United States Patent Application Publication US 2026/0297598 A1, published October 1, 2026 (application 19/479,846).

The application's sequence listing, which the Patent Office published only in electronic form, follows.

SEQUENCE LISTING (628 sequences)

SEQ ID NO: 1 - DNA, 134 bp, Tobacco mosaic virus
  source 1..134: mol_type = other DNA
taggtttgagagagaagattacaaacgtgagagacggagggcccatggaacttacagaagaagtcgttgatgagttcatggaagatgtccctatgtcgatcaggcttgcaaagtttcgatctcgaaccggaaaa

SEQ ID NO: 2 - DNA, 198 bp, Tobacco mild green mosaic virus
  source 1..198: mol_type = other DNA
aaggtttgagggaacgtattttgagtgtgacagacggctcgccaattgaactcactgaaaaggttgttgaggagttcgtggatgaagtaccaatggctgtgaaactcgaaaaggttccggaaaacaaaaaagaaatggtaggtaataatgttaataataagaaaataaataacagtggtaagaagggttttaaaattg

SEQ ID NO: 3 - DNA, 133 bp, Tomato mosaic virus
  source 1..133: mol_type = other DNA
tgggtttgagggagaaagtaacgagtgtgaacgatggaggacccatggaactttcagaagaagttgttgatgagttcatggagaatgttccaatgtcggttagactcgcaaagtttcgaaccaaatcctcaaa

SEQ ID NO: 4 - DNA, 134 bp, Pepper mild mottle virus
  source 1..134: mol_type = other DNA
taggcttgagagagaaaattactagtgtgtcagaaggaggacccgttgaacttacagaagcagtcgttgatgagttcatcgaatcagttccaatggctgacagattacgtaaatttcgcaatcaatctaagaaa

SEQ ID NO: 5 - DNA, 139 bp, Paprika mild mottle virus
  source 1..139: mol_type = other DNA
aaggtttacgagagaaagtgactacagtgtcagaggacagcgctattgaacttacagaggaagttgttgatgagttcatagaggcagtaccgatggcacgtcggttgcaaaatttcaggaaacccaaaaataatattag

SEQ ID NO: 6 - DNA, 134 bp, Bell pepper mottle virus
  source 1..134: mol_type = other DNA
tgggtttgagggagaagattacaagagtaaccgacgccgggcctatggaacttactgaagaagttgttgatgagttcatagagaatgtcccgatggcggcaaggcttgcaagatttcgaaccaaatcctcaaaa

SEQ ID NO: 7 - DNA, 138 bp, Tomato mottle mosaic virus
  source 1..138: mol_type = other DNA
tgggtttgagggagaagattacaagagtggatgacgcaggtcccattgaacttaccgaagaagttgttgatgagttcatggagagtgtgcctatgtcagtcaggcttgctaaatttcgaaccaaatcctcaaaaagag

SEQ ID NO: 8 - DNA, 135 bp, Odontoglossum ringspot virus
  source 1..135: mol_type = other DNA
tcggactgagagagaagattttgaacgtaacagaaggagggcccaccgaacttactgaagcagttgttgatagattcgtggagaaagttcctatggctgctaggctcaagtcttttcgctctgtcaacaaaaaga

SEQ ID NO: 9 - DNA, 201 bp, Obuda pepper virus
  source 1..201: mol_type = other DNA
agggtctaagagagaaggtgactgccgtgtccgaagacgacgctatagaactcacagaagaggttgttgatgagtttatagaagccgtaccgatggcgcgacgtttgcagaacttgagaaaacccaagtacaacaaagaaaaagaaaataaaaatttgaataataaaaatagtataggagtttccaaacctgtcggtttag

SEQ ID NO: 10 - DNA, 136 bp, Rehmannia mosaic virus
  source 1..136: mol_type = other DNA
tgggtttgagggagaaaatcacaactgtgaaagatggaggacccatggaactcaccgaagaagtggtagacgagttcatggaagacgttccaatgtctgtcagacttgcgaagtttcgatctcgaaccggaaaaaa

SEQ ID NO: 11 - DNA, 134 bp, Brugmansia mild mottle virus
  source 1..134: mol_type = other DNA
aaggattgcgtgaaaggatcacgaatgttgccgaaggcggttcacttgagctcactgaagaagttgttgagagctttgtgaatgacgtccctatggcagtacgactgaaccatttacgtaatggaaacaaaaaa

SEQ ID NO: 12 - DNA, 134 bp, Yellow tailflower mild mottle virus
  source 1..134: mol_type = other DNA
ccggtctgagagagaaagtaacttccgtgtcagaagggtctccgattgaactcacagaagatgttgtagatgagtttttcgagagtgtccctatggctcgtaggttgcagaacttgaggaataggcgaggaaat

SEQ ID NO: 13 - DNA, 137 bp, Tropical soda apple mosaic virus
  source 1..137: mol_type = other DNA
ttggactgagggagaaaattacaaatgtctcagacggaggacccgtcgaacttacagaagaagttgttgatgagttcgtcgaatcagttcctatggctgagagattacgtaaatttcgaggacggtccaacaaaaag

SEQ ID NO: 14 - DNA, 432 bp, Cucumber green mottle mosaic virus
  source 1..432: mol_type = other DNA
taccctcgtctgtcgtagatattaattctagattcccagatgcgggtttttacgctttcctcaacggtcctgtgttgaggcctatcttcgtttcgcttctcagctccacggatacgcgtaatagggtcattgaggttgtagatcctagcaatcctacgactgctgagtcgcttaacgctgtaaagcgtactgatgacgcgtctacagccgctagggccgagatagataatttaatagagtctatttctaagggttttgatgtttacgatagggcttcatttgaagccgcgttttcggtagtctggtcagaggctaccacctcgaaagcttagtttcgagggtcttctgatggtggtgcacaccaaagtgcatagtgctttcccgttcacttaaatcgaacggtttgctcattggtttgcggaaacctctcac

SEQ ID NO: 15 - DNA, 347 bp, Cucumber fruit mottle mosaic virus
  source 1..347: mol_type = other DNA
tttttgtccttattatgctttgtatgatctgttggtgtcagcccaaggtggagccctgcaaacgcaaaatggtaaagacattttgcgtgactccataaatgggttgttaacgacagttgcgtctcctaggagtcggttccctgcggaagggttctttgtctggtcccgtgagtcgcgcattgctgctatattagattctctgctttcggcgttggattcaagaaatagggctattgaagttgaaaacccttctaatccttcgaccagtgaagctttgaatgctactaagcgcaatgacgacgcgtctactgctgcgcacaacgacattcctcagctgatttcagctt

SEQ ID NO: 16 - DNA, 297 bp, Kyuri green mottle mosaic virus
  source 1..297: mol_type = other DNA
tgttaacttctgttgcgtctctcaattcacgttttcctgctaatgagtttttcgtgtggtctcgtgagtcgcgcattgctgccataatcgattcgttgttatccgctttggattctagaaatagggctatcgaagttgaaaacccttctaatccttctaccggagaagctctgaatgcgaccaagcgcaatgacgacgcgtctacagccgcgcacaacgacattcctctgcttttagcagctctgaatgacggtgtgggcgtttttgatagtgcgtcttttgagtcagctttcggtc

SEQ ID NO: 17 - DNA, 335 bp, Zucchini green mottle mosaic virus
  source 1..335: mol_type = other DNA
tgctgtcttctgttgcgtcacccacttcacagtttccttccggtgtgttttatgtgtggtctcgtgagtcgcgcattgctgctttgatcgattctctcttcggtgctttggattcaagaaatagggctattgaagttgaaaacccttctaatccatcgactggcgaagctttgaacgcggttaagcgcaatgacgacgcgtctacagccgctcacaacgacattcctcagattttatctgctctgaatgaaggtgcgggcgtttttgatagagcgtcttttgaatctgcttttggtctcgtgtggaccgcaggttcgtctacctcgtcttgaggc

SEQ ID NO: 18 - DNA, 238 bp, Cucumber mottle virus
  source 1..238: mol_type = other DNA
tcttttcctcgcccgtgagtcctaccgtcagatttcctgacggagttttttatgtgtttttaggtaatcctgttttggatccgctttttaaagctctgttacagtcgttggatacaagaaatagggtcatagaggttgataacccttctaatcctacgactgctgagtctttaaacgctgtccagcgtactgacgattctactgtcagttcgcgtgtgggtttaataaacttgcgtgc

SEQ ID NO: 19 - DNA, 238 bp, unidentified
  source 1..238: mol_type = other DNA
ttttcacctctcctgtgagtccgaccgttagatttcctgacggtccgtttttcattttcttagggaatcctgtgttggatccgctttttaaagctcttctgcagtcgctggatacaagaaatagggttattgaggttgacaatccttctaatcctactactgcggaatctttgaacgcgattcagcgtactgacgactcttccgtcagttcgcatgtcggtctagttaaccttcgcgc

SEQ ID NO: 20 - DNA, 246 bp, Turnip vein-clearing virus
  source 1..246: mol_type = other DNA
agggtttgagggaaaaggtcgtcgcaataaatgatccggacgtcgaaggtttcgaaggtgtggttgacgaattcgtcgattcggttgcagcatttaaagcggttgacaatttcaggaagaggaaaaagaaggttgaagaaagggatgtagtaagtaagtataaatatagaccggagaaatacgccggtcctgattcgtttaatttaaaagaagaaaatgtcttacaacattacaaacccgaatcag

SEQ ID NO: 21 - DNA, 246 bp, Ribgrass mosaic virus
  source 1..246: mol_type = other DNA
agggtttgagagaaaagatcatcgcgataagtgatccggacgtcgaaggtttcgaaggagtggttgacgatttcgttgattcggtcgaagcatttagagcggttgataatttcaggaaaaagaaaaggaagataggagaaaaggaagcggtaagtaggaataagtacagaccggagaaacacgccggtcctaattcgttatatattaaagaagaaaatgtcttacaacatcacgagctcgaatcag

SEQ ID NO: 22 - DNA, 246 bp, Wasabi mottle virus
  source 1..246: mol_type = other DNA
agggtttaagagaaagagtcatcgctgtagatgatccgaacgttgagggtttcgaaggtgtagttgacgaattcatcgattcggttgcagcatttaaagcggttgacaatttcaggaaaaagaaaaggaagattggaggaagggatgtgattagtaagtataagtatagaccagagaagtacgccggtcctgattcgttacttaataaagaagaaaatgtcatacaacatcacgaactcgaatcag

SEQ ID NO: 23 - DNA, 249 bp, Youcai mosaic virus
  source 1..249: mol_type = other DNA
aaggtttgagggaaaaagtcatcgctgtgaatgatccgaacgtcgaaggtttcgaaggtgtggttgacgatttcgtcgattcggttgctgcattcaaggcgattgacagtttcaggaagaaaaagaaaaggattggaggaagggatgtaaatagtaataagtatagatatagaccggagagatacgccggtcctgattcgttacaatataaagaagaaaatggtttacaacatcacgagctcgaatcag

SEQ ID NO: 24 - DNA, 258 bp, Streptocarpus flower break virus
  source 1..258: mol_type = other DNA
agggtttgcgtgaaaggcttaataatgtgggagatccaaatgttgaagtttcagaagttgtcgttgatgagttcgtggactcgatttccgcttcacagtcgttaagccgtgctcgtaataaatacgttcgtggtaatggtaaggttgggaataatagtggtggttttagtaagtataatcgtcatcagccggagaggttcgccggcaaggctatgtataattctaaaaatgtcgtacgtggtggtacttccgaaccaa

SEQ ID NO: 25 - DNA, 333 bp, Rattail cactus necrosis-associated virus
  source 1..333: mol_type = other DNA
tgcttttatgacaggatcttacccaacaattcgactgtgctcaacgactatgacagtttcaccttgagagtgagagacattcatctcaacttggacgattgtagactcgacctgtcaaaggacgatccagcaatctgtcggaggcagtcgggttatctgcgtcccgttcttagaaccggtacggagagacctcgacagcccgggctcattgagaatgtcttagctcttatcaagagaaatttcaatgcacctcatcttcttggaactgtagacgtcgatgcaatggccgacaccgtagtggataagttttttaaaattttcttccctgatggt

SEQ ID NO: 26 - protein, 159 aa, Tobacco mosaic virus
MSYSITTPSQFVFLSSAWADPIELINLCTNALGNQFQTQQARTVVQRQFSEVWKPSPQVTVRFPDSDFKVYRYNAVLDPLVTALLGAFDTRNRIIEVENQANPTTAETLDATRRVDDATVAIRSAINNLIVELIRGTGSYNRSSFESSSGLVWTSGPAT

SEQ ID NO: 27 - protein, 159 aa, Tobacco mild green mosaic virus
MPYTINSPSQFVYLSSAYADPVQLINLCTNALGNQFQTQQARTTVQQQFADAWKPVPSMTVRFPASDFYVYRYNSTLDPLITALLNSFDTRNRIIEVDNQPAPNTTEIVNATQRVDDATVAIRASINNLANELVRGTGMFNQAGFETASGLVWTTTPAT

SEQ ID NO: 28 - protein, 159 aa, Tomato mosaic virus
MSYSITSPSQFVFLSSVWADPIELLNVCTNSLGNQFQTQQARTTVQQQFSEVWKPFPQSTVRFPGDVYKVYRYNAVLDPLITALLGAFDTRNRIIEVENQQSPTTAETLDATRRVDDATVAIRSAINNLVNELVRGTGLYNQNTFESMSGLVWTSAPAS

SEQ ID NO: 29 - protein, 157 aa, Pepper mild mottle virus
MAYTVSSANQLVYLGSVWADPLELQNLCTSALGNQFQTQQARTTVQQQFSDVWKTIPTATVRFPATGFKVFRYNAVLDSLVSALLGAFDTRNRIIEVENPQNPTTAETLDATRRVDDATVAIRASISNLMNELVRGTGMYNQALFESASGLTWATTP

SEQ ID NO: 30 - protein, 161 aa, Paprika mild mottle virus
MPYTVSSPNQLVYFGSVWADPIALIDLCTVSLGNQFQTQNARTTVQQQFSDLFKTVPTRTIRFSDGENGFRVFRYNSTLDPLITALLNSFDTRNRIIETENPANPNTAEIASATQRVDDATVSIRACINNLMNELARGTGMLNTASFETVSNLTWTTAATT

SEQ ID NO: 31 - protein, 160 aa, Bell pepper mottle virus
MSYTVNSPSQLVYLSSAWADPTDLLNLCTNSLGNQFQTQQARTTVQQQFSDVWKPTPQAGVRFPASGFKVYRYNAVLDPLITALLGTFDTRNRIIEVENQQNPTTAETLDATRRVDDATVAIRSAINNLANELVRGTGMYNQTSFESMAGLTWTTTPPSG

SEQ ID NO: 32 - protein, 159 aa, Tomato mottle mosaic virus [sequence omitted]

SEQ ID NO: 33 - protein, 158 aa, Odontoglossum ringspot virus
MSYTITDPSKLAYLSSAWADPNSLINLCTNSLGNQFQTQQARTTVQQQFADVWQPVPTLTSRFPAGAGHFRVYRYELILEPLITFLMGTFDTRNRIIEVRNPQNPTTTETLDATRRVDDATVAIRSAINNLLNELVRGNGMYNQVSFETMSGLTWTSS

SEQ ID NO: 34 - protein, 161 aa, Obuda pepper virus
MPYTVTSPSQLVYFGSVWADPITFIDLCTVALGNQFQTQNARTTVQQQFSDLFKTVPTRTNRFNDGENGFRVFRYNSTLDPLISALMNSFDTRNRIIEVDNPANPNTSEVASATQRVDDATVNIRACINNLMNELVRGTGMMNTASFETVSNLTWTTTTTT

SEQ ID NO: 35 - protein, 159 aa, Rehmannia mosaic virus
MSYTIATPSQFVYLSSAWADPVELINLCTNALGNQFQTQQARTVVQRQFSEVWKPSPQVTVRFPANDFKVYRYNAVLDPLVTALLGAFDTRNRIIEVENQANPTTAETLDATRRVDDATVAIRSAINNLVVELIRGTGSYNRSAFESSSGLVWTSGPAT

SEQ ID NO: 36 - protein, 159 aa, Brugmansia mild mottle virus
MAYTITAPNQIVYLGVAYADPILLMNLCTTSQGNQFQTQNARTTVQQQFADIWKAVPAVNIRFPENGFLVYRYNAVLDQLVTSLLNSFDTRNRIIEVENPPNPTNGEIMSATQRVDDATVNIRASITNLMNELVRGTGFLNRSSFESTSGLTWSTAPTT

SEQ ID NO: 37 - protein, 158 aa, Yellow tailflower mild mottle virus
MSYAITSPKQFAYLTNAYADPIALISLCNNALGNQFQTQNARTTVQQQFNDIWKELPTQISRFPVGIYRVYRFDSTIDPLITSVLNSFDTRNRIIETENPANPSTTEVVNATQRVDDATVNIRSSINNLCNELIRGTGFLNQATFEEASQLTWTARTT

SEQ ID NO: 38 - protein, 160 aa, Tropical soda apple mosaic virus
MSYTISNPNQLVYLASVWADPTELLNLCTSALGNQFQTQQARTTVQQQFSDVWKTVPATNIRFPNAGFKVYRYNAVLDSLITALLGSFDTRNRIIEVENPQNPTTAETLDATRRVDDATVAIRSSINNLMNELVRGTGMYNQAQFESVSGLTWATTATSS

SEQ ID NO: 39 - protein, 161 aa, Cucumber green mottle mosaic virus
MAYNPITPSKLIAFSASYVPVRTLLNFLVASQGTAFQTQAGRDSFRESLSALPSSVVDINSRFPDAGFYAFLNGPVLRPIFVSLLSSTDTRNRVIEVVDPSNPTTAESLNAVKRTDDASTAARAEIDNLIESISKGFDVYDRASFEAAFSVVWSEATTSKA

SEQ ID NO: 40 - protein, 162 aa, Cucumber fruit mottle mosaic virus
MSYSTSGLRSLPAYTKSFCPYYALYDLLVSAQGGALQTQNGKDILRDSINGLLTTVASPRSRFPAEGFFVWSRESRIAAILDSLLSALDSRNRAIEVENPSNPSTSEALNATKRNDDASTAAHNDIPQLISALNDGAGVFDRASFESQFGLVWTAASSSTSK

SEQ ID NO: 41 - protein, 161 aa, Kyuri green mottle mosaic virus
MSYSTSGIRSLPAFAKSFYPFYDVYNLLVSAQGGALQTQNGKDILRESLTGLLTSVASLNSRFPANEFFVWSRESRIAAIIDSLLSALDSRNRAIEVENPSNPSTGEALNATKRNDDASTAAHNDIPLLLAALNDGVGVFDSASFESAFGLTWTASATSSK

SEQ ID NO: 42 - protein, 161 aa, Zucchini green mottle mosaic virus
MPYSTSGIRSLPAFSKSFFPYLELYNLLITNQGAALQTQNGKDILRESLVGLLSSVASPTSQFPSGVFYVWSRESRIAALIDSLFGALDSRNRAIEVENPSNPSTGEALNAVKRNDDASTAAHNDIPQILSALNEGAGVFDRASFESAFGLVWTAGSSTSS

SEQ ID NO: 43 - protein, 162 aa, Cucumber mottle virus
MAYSPITPTNLSLFSSNYVPFTEFYNYLVTAQGEAFQTQQGRDSVRDSLSGFFSSPVSPTVRFPDGVFYVFLGNPVLDPLFKALLQSLDTRNRVIEVDNPSNPTTAESLNAVQRTDDSTVSSRVGLINLRAAITQGNGVVNRSIFESSNGLTWATSGSSSSK

SEQ ID NO: 44 - protein, 162 aa, unidentified
MAYTPITPTNLPLFSSNYVPYTEFYNYLVSAQGEAFQTQQGRDAVRTTLSGFFTSPVSPTVRFPDGPFFIFLGNPVLDPLFKALLQSLDTRNRVIEVDNPSNPTTAESLNAIQRTDDSSVSSHVGLVNLRAAIAQGNGVVNRSIFESSSGLTWATSSASTSK

SEQ ID NO: 45 - protein, 157 aa, Turnip vein-clearing virus
MSYNITNPNQYQYFAAVWAEPIPMLNQCMSALSQSYQTQAARDTVRQQFSNLLSAVVTPSQRFPDTGSRVYVNSAVIKPLYEALMKSFDTRNRIIETEEESRPSASEVANATQRVDDATVAIRSQIQLLLSELSNGHGYMNRAEFEALLPWTTAPAT

SEQ ID NO: 46 - protein, 157 aa, Ribgrass mosaic virus
MSYNITSSNQYQYFAAVWAEPTPMLNQCVSALSQSFQTQAGRDTVRQQFSNLLSAIVAPNQRFPDTGFRVYVNSAVIKPLYEALMKSFDTKNRIIETEEESRPSASEVANATQRVDDATVAIRSQIQLLLNELSNGHGYMNRAEFEAILPWTTAPAT

SEQ ID NO: 47 - protein, 157 aa, Wasabi mottle virus
MSYNITNSNQYQFFAAVWAEPIAMLNQCISALSQSYQTQAARDTVRQQFSNLLSAIVTPNQRFPETGYRVYVNSAVLKPLYEALMKSFDTRNRIIETEEESRPSASEVANATQRVDDATVAIRSQIQLLLSELSSGHGLMNRAEFEVLIPWATAPAK

SEQ ID NO: 48 - protein, 157 aa, Youcai mosaic virus
MVYNITSSNQYQYFAAMWAEPTAMLNQCVSALSQSYQTQAARDTVRQQFSNLLSAIVTPNQRFPEAGYRVYINSAVLKPLYESLMKSFDTRNRIIETEEESRPSASEVANATQRVDDATVAIRSQIQLLLNELSNGHGLMNRAEFEVLLPWATAPAT

SEQ ID NO: 49 - protein, 157 aa, Streptocarpus flower break virus
MSYVVVLPNQLQFFTNAWADPIQLMNLCSASLSQIFQTQAARDAVREQFGNTLRSVVTQTTRFPEAGFQVYINDAALKPLWENLLKSFDTKNRILETEEETRPSTAEVLNATQRVDDSTTAIRGALQRLSDELNRGSGYMNRTSFETILLWSAATAK

SEQ ID NO: 50 - protein, 170 aa, Rattail cactus necrosis-associated virus
MPYINVQPKDFVYLTRSWVDPQRLIQFLSDMQTQAFQAQQSRTQLLNELSTMVVYGPTKSDRFPIDTYLINITKGGLSAYWFGLTQSADTKDRVFEVSEARAVTNAESKLATQRVDDATVAIRNAIKSTLSYLIAGEDIYSRTSFEAALGWIWQENLPPPPQTAASDSRT

SEQ ID NO: 51 - protein, 268 aa, Tobacco mosaic virus
MALVVKGKVNINEFIDLTKMEKILPSMFTPVKSVMCSKVDKIMVHENESLSEVNLLKGVKLIDSGYVCLAGLVVTGEWNLPDNCRGGVSVCLVDKRMERADEATLGSYYTAAAKKRFQFKVVPNYAITTQDAMKNVWQVLVNIRNVKMSAGFCPLSLEFVSVCIVYRNNIKLGLREKITNVRDGGPMELTEEVVDEFMEDVPMSIRLAKFRSRTGKKSDVRKGKNSSNDRSVPNKNYRNVKDFGGMSFKKNNLIDDDSEATVAESDSF

SEQ ID NO: 52 - protein, 256 aa, Tobacco mild green mosaic virus
MAVSLRDTVKISEFIDLSKQDEILPAFMTKVKSVRISTVDKIMAVKNDSLSDVDLLKGVKLVKKGYVCLADLVVSGEWNLPDNCRGGVSVCIVDKRMKRSKEATLGAYHAPACKKNFSFKLIPNYSITSEDAEKHPWQVLVNIKGVAMEEGYCPLSLEFVSICVVHKNNVRKGLRERILSVTDGSPIELTEKVVEEFVDEVPMAVKLEKVPENKKEMVGNNVNNKKINNSGKKGFKIEEIEDNVSDDESIASSSTF

SEQ ID NO: 53 - protein, 264 aa, Tomato mosaic virus
MALVVKGKVNINEFIDLSKSEKLLPSMFTPVKSVMVSKVDKIMVHENESLSEVNLLKGVKLIEGGYVCLVGLVVSGEWNLPDNCRGGVSVCMVDKRMERADEATLGSYYTAAAKKRFQFKVVPNYGITTKDAEKNIWQVLVNIKNVKMSAGYCPLSLEFVSVCIVYKNNIKLGLREKVTSVNDGGPMELSEEVVDEFMENVPMSVRLAKFRTKSSKRGPKNNNNLGKGRSGGRSKPKSFDEVEKEFDNLIEDEAETSVADSDSY

SEQ ID NO: 54 - protein, 257 aa, Pepper mild mottle virus
MALVVKDDVKISEFINLSAAEKFLPAVMTSVKTVRISKVDKVIAMENDSLSDVNLLKGVKLVKDGYVCLAGLVVSGEWNLPDNCRGGVSVCLVDKRMQRDDEATLGSYRTSAAKKRFAFKLIPNYSITTADAERKVWQVLVNIRGVAMEKGFCPLSLEFVSVCIVHKSNIKLGLREKITSVSEGGPVELTEAVVDEFIESVPMADRLRKFRNQSKKGSNKYVGKRNDNKGLNKEGKLFDKVRIGQNSESSDAESSSF

SEQ ID NO: 55 - protein, 269 aa, Paprika mild mottle virus
MSSKSIVNIEEFINMSKAEEVLPAALTRMKSVRISTVDKIMATDNDNISEVDLLKGVKLIKNGYVCLVGLVVSGEWNLPDNCRGGVSVCLIDKRMQRHNEATLGSYTAKASKKNFSFKLIPNYSITSQDAERRPWEVMVNIRGVAMEEGWCPLSLEFVSVCIVHKNNVRKGLREKVTTVSEDSAIELTEEVVDEFIEAVPMARRLQNFRKPKNNISKNFVNKGSSKPRNIPKLNEDKVFKLEKGLKGVKGMTNASRDDSSSEISSDSFN

SEQ ID NO: 56 - protein, 278 aa, Bell pepper mottle virus
MAIVVKDKVNVNDFINLSNSEKYLPSNSEKYLPSLMTPVKSVRISKVDKVLARENETLSEVDLLKGVKLIEGGYICLAGLVVTGEWNLPDNCTGGVSVCLVDKRMERASEATLGSYYTGAAKKRFQFKVTPNYSVTTDDAKKNIWQVLVNIKGVRMSAGFCPLSLEFVSVCIVFKNNIKLGLREKITRVTDAGPMELTEEVVDEFIENVPMAARLARFRTKSSKTGPKKFVRNSRDSKVRSNNLNRGVRPKFEEEGIVSDKLINDESESIDADSDSYL

SEQ ID NO: 57 - protein, 268 aa, Tomato mottle mosaic virus
MALTVSGKVRISEFIDLSKSERLLPSMFTHVKSVSVSKVDKVMVNEEDSLSEVNLLKGVKLIDGGYVCLAGLVVSGEWNLPDNCRGGVSICLVDKRMQRADEATLGSYYTGAAKKRFQFKIVPNYAITTKDAERNIWQVLVNIRNVKMAGGFCPLSLEFVSVCIVYKNNIKLGLREKITRVDDAGPIELTEEVVDEFMESVPMSVRLAKFRTKSSKRGPKHNSNNTNERKGRSNFRKKQDQESYGVSDSLDNLIEDDTETSVAGSDSY

SEQ ID NO: 58 - protein, 303 aa, Odontoglossum ringspot virus
MGRLRFVVLLSIFPIKTFSEPCYTMALVLRDSIKISEFINLSAFEKLLPSALTAVKSVRIPKVDKIISYENDTLSDIDLLKGVKLVENGYVCLAGLVVTGEWNLPDNCKGGVSICLVDKRMKRANEATLGSYHTSACKKRFTFKIIPNYSVTTADALKGIWQVMTNIRGVEMEKGFCPLSLEFVSICVVYLNNIKLGLREKILNVTEGGPTELTEAVVDRFVEKVPMAARLKSFRSVNKKKPSNSSKFVNGKSRLNSRNKLNYENGDSDVGTSVVDDIVVGNGVSDIRIDDDCESFDAQSESY

SEQ ID NO: 59 - protein, 274 aa, Obuda pepper virus
MSKAIVKIDEFIKLSKSEEVLPSAFTRMKSVRVSTVDKIMAKENDNISEVDLLKGVKLVKNGYVCLVGLVVSGEWNLPDNCRGGVSICLIDKRMQRHNEATLGSYTTKASKKNFSFKLIPNYSITSQDAERRPWEVMVNIRGVAMSEGWCPLSLEFVSVCIVHKNNVRKGLREKVTAVSEDDAIELTEEVVDEFIEAVPMARRLQNLRKPKYNKEKENKNLNNKNSIGVSKPVGLERNKVRSVVRKGVRSDSSLGVTDMSQDGSSSEISSDSFI

SEQ ID NO: 60 - protein, 267 aa, Rehmannia mosaic virus
MALVVKGKVNIGEFIDLTKTEKLLPSMFTPVKSVMCSKVDKVMVHENESLSEVNLLKGVKLIENGYVCLAGLVVTGEWNLPDNCRGGVSVCLVDKRMERADEATLASYYTAAAKKRFQFKVVPNYAITTHDAMKNVWQVLVNIRNVKMSAGFCPLSLEFVSVCIVYRNNIKLGLREKITTVKDGGPMELTEEVVDEFMEDVPMSVRLAKFRSRTGKKNNVKKVKFEGVDRSVPKMNKGKSRNNGGVFERNIFIDNDSETNVAEPDSF

SEQ ID NO: 61 - protein, 271 aa, Brugmansia mild mottle virus
MTLSIRDSFKIDEFINLSKVEKAVPALFSRVKTVRVSTVDKIMATKNDSLSDVDLLKGVKLVNNGYVCLVGLVVSGEWNLPDNCKGGVSVCLVDKRMKRANEATLGSYHSRACKKNFSFKLIPNYSITTADAEKQPWQVLVNIRGVQMEQGYCPLSLEFVSVCIVHKNNVRKGLRERITNVAEGGSLELTEEVVESFVNDVPMAVRLNHLRNGNKKEGFSKGKYVNNNAKERSVNKFVKKSVNGKGGLKVKEISTSVEDYNSSEVSSDSFI

SEQ ID NO: 62 - protein, 266 aa, Yellow tailflower mild mottle virus
MAIALRDTVKINEFINLSKTEEILPAMFTRMKSVRISTVDKVVAKENDSVSEVDLLKGVKLVKNGYVNLVGLVVSGEWNLPDNCRGGVSVCLVDRRMTRHSEATLGSYTAPACKKNFSFKLIPNYSVTTADAERRPWEVMVNIKGVAMAEGWCPLTLEFVCVCIVHKTNVRTGLREKVTSVSEGSPIELTEDVVDEFFESVPMARRLQNLRNRRGNINRNKSQVYKKKNKNNIGDALKERIDEVKDVENKRYDNDDYSIEESSDSY

SEQ ID NO: 63 - protein, 256 aa, Tropical soda apple mosaic virus
MALVVKDDVKISEFINLSTSEKFLPAAMTSVKSVRVSKIDKVIATENDSLSDVDLLKGVKLIEEGYVCLAGLVVSGEWNLPDNCRGGVSVCLVDKRMLRHDEATLGSYKTGAAKKRFAFKLIPNYSVTTADAKRNIWQVLVNIKGVAMEKGFCPLSLEFVSVCIVHKTNIKLGLREKITNVSDGGPVELTEEVVDEFVESVPMAERLRKFRGRSNKKSNKFVEKNNNKRGDKGGKLLKKIDNETETESSDAESSSY

SEQ ID NO: 64 - protein, 264 aa, Cucumber green mottle mosaic virus
MSLSKVSVENSLKPEKFVKISWVDKLLPNYFSILKYLSITDFSVVKAQSYESLVPVKLLRGVDLTKHLYVTLLGVVVSGVWNVPESCRGGATVALVDTRMHSVAEGTICKFSAPATVREFSVRFIPNYPVVAADALRDPWSLFVRLSNVGIKDGFHPLTLEVACLVATTNSIIKKGLRASVVESVVSSDQSIVLDSLSEKVEPFFDKVPISAAVMARDPSYRSRSQSVGGRGKRHSKPPNRRLDSASEESSSVSFEDGLQSDHT

SEQ ID NO: 65 - protein, 258 aa, Cucumber fruit mottle mosaic virus
MSISKVGVRNALKPEEFVKITWVDKLLPDAFTILKYLSITDYSVVQSKDYEHLIPVDLLRGVDFSKSKYVTLVGVVISGVWTIPENCAGGATVALVDTRMSLVSEGTICKFSVSAASRDFTVKLIPNYYVTAADASSKPWSLFVRISGVRIKDGFSPLTLEIASLVATTNSILKKGLRVSVIESVVGSDASVSLDTLSEKVQPFFDSVPITASVVSRDRSYVSKGRPPSRSGPVSRKSKSKSEAESFSDSGASEPLSS

SEQ ID NO: 66 - protein, 262 aa, Kyuri green mottle mosaic virus
MSVSSVGVKNALKPQEFVKLSWVDKVLPDMFTVFRYLSVTDYSVIKSRDSECLIPVDLLRGVDLSKSKYVTLVGVVISGVWTIPENCAGGATVALVDTRMSMVDEGTICKFSVAASTRDFMVKLIPNYYVTASDASSKPWSIFVRVSGVRIKEGFSPLTLEIASLVATTNSILKKGLRVSVLESVVGSDASINLDSVSDKVQPFFDSVPITAAVIARDRSYVSKSGPSRAVRPRPQSKSGKKGDANPAESMSDGDAYEPPRL

SEQ ID NO: 67 - protein, 261 aa, Zucchini green mottle mosaic virus
MSVSKLGVKNVLKPQEFVKLNWVDKVLPDMFTVFRYLSVTDYSVIKSRDSECLIPVDLLRGVDLSKSKYVTLVGVVISGVWTIPENCAGGATVALVDTRMSMVDEGTICKFSVAASARDFMVKLIPNYYVTATDASSKPWSIFVRVSGVRIKEGFSPLTLEIASLVATTNSILKKGLRVSVLESVVGSDASVNLESASEKVQPFFDSVPITAAVISRDRSYVSKSGFNRAVRSKPPSKGGKKFGDSAESLSEDSASELPGL

SEQ ID NO: 68 - protein, 262 aa, Cucumber mottle virus
MSISNLSVESQLKPSNFVKLSWVDKLLPDYFSILRFLSVTDHSVIKAREYESFLPVELLRGVDLTKHKYVTLLGVVISGVWTIPEGCSGGATVGLVDTRMERVVEGTVCKFSVPASVREFNVRFIPNYSITAADAARHPWSLFVRLKGVNIKDSFSPLTLEIAALVATTNSIIKKSLKAIVSDVVVGSDAAVAIADRDSQVNSFFDSVPITKSVVNFDKSYKSRVPKKDSSGGSGKVKRSTGTSGPADTEFSDDGLLSNHSD

SEQ ID NO: 69 - protein, 262 aa, unidentified
MSISNLSVESQLKPSNFVKLSWVDRLLPDYFSILRFISVTDHSVVKAREYESFLPVELLRGVDLTKHKYVTLLGVVISGVWTIPEGCSGGATIGLVDTRMERVSEGTVCKFSVPASVREFNVRFIPNYSITASDAARHPWSLFVRLKGVSIKDSFSPLTLEIAALVATTNSIIKKSLKAVVSSVVVGSDAAVAIEDKDSSVNSFFDSVPITKSVINFDKSYKSKVPRKGSSVVSVKGKAGVGTSGPTDTEFSDYGLHSDHTD

SEQ ID NO: 70 - protein, 267 aa, Turnip vein-clearing virus
MSIVSYEPKVSDFLNLSKKEEILPKALTRLKTVSISTKDIISVKESETLCDIDLLINVPLDKYRYVGILGAVFTGEWLVPDFVKGGVTISVIDKRLVNSKECVIGTYRAAAKSKRFQFKLVPNYFVSTVDAKRKPWQVHVRIQDLKIEAGWQPLALEVVSVAMVTNNVVMKGLREKVVAINDPDVEGFEGVVDEFVDSVAAFKAVDNFRKRKKKVEERDVVSKYKYRPEKYAGPDSFNLKEENVLQHYKPESVPVLRSGVGRAHTNA

SEQ ID NO: 71 - protein, 267 aa, Ribgrass mosaic virus
MSMVSYEPKVNDFLFLTNKEKILPKALTRLKTVSISTKDIISVKESETLCDIDLLIDVPLDKYRYVGILGAVFTGEWLVPDFVKGGVTISVIDKRLVNSKECVIGTYRAAAKSKRFQFKLVPNYFVSTADAKRKPWQVHVRIQDVKIEAGWQPLALEVVSVAMVANNVVMKGLREKIIAISDPDVEGFEGVVDDFVDSVEAFRAVDNFRKKKRKIGEKEAVSRNKYRPEKHAGPNSLYIKEENVLQHHELESVPVLRSGVGRTHTNA

SEQ ID NO: 72 - protein, 267 aa, Wasabi mottle virus
MSTVSYKPKVSDFLSLSRTEEILPKALTRLKTVSVSTKDVISVKESESLCDIDLLVNVPLDKFRYVGILGVVFTGEWLIPDFVKGGVTVSVIDKRLENSKECIIGTYRAAAKDRRFQFKLVPNYFVSVTDAKRKPWQVHVRIQNLKIEAGWQPLALEVVSVAMVTNNVVVKGLRERVIAVDDPNVEGFEGVVDEFIDSVAAFKAVDNFRKKKRKIGGRDVISKYKYRPEKYAGPDSLLNKEENVIQHHELESVPVFCSGMGRAHSDA

SEQ ID NO: 73 - protein, 265 aa, Youcai mosaic virus
MSYEPKVSDFLALTKKEEILPKALTRLKTVSISTKDVISVKESESLCDIDLLVNVPLDKYRYVGVLGVVFTGEWLVPDFVKGGVTVSVIDKRLENSKECIIGTYRAAAKDRRFQFKLVPNYFVSVADAKRKPWQVHVRIQNLKIEAGWQPLALEVVSVAMVTNNVVVKGLREKVIAVNDPNVEGFEGVVDDFVDSVAAFKAIDSFRKKKKRIGGRDVNSNKYRYRPERYAGPDSLQYKEENGLQHHELESVPVFRSDVGRAHSDA

SEQ ID NO: 74 - protein, 288 aa, Streptocarpus flower break virus
MAIVLSKPKVSEFLNLTKAEEILPKFLTRLKTVAISTRDVVSVKGTTDLVDIDLLRDVPVNNWRYVGIVGIVASGEWLLPDNVSGGVAISFVDKRLVDSREAILGTYRAAAVEKRFQFKLIPNYFVSQEDALRRPWQVQVSLKGLKFEEGFSPLTLEFVSVVVCANSVVTKGLRERLNNVGDPNVEVSEVVVDEFVDSISASQSLSRARNKYVRGNGKVGNNSGGFSKYNRHQPERFAGKAMYNSKNVVRGGTSEPTAILHKRMGGSNSIDESLFSVAESDLSDSGCA

SEQ ID NO: 75 - protein, 334 aa, Rattail cactus necrosis-associated virus
MSSLCVSDPAVLLSPELHLKVPQLKSLVQFWKKPFKTCSISMSDVIKVASSNPLSIAVDFSSAMPSGPRNFKYVYILAVVLTGRWHLSESCPGGATFVLYDKRLCGRAEGIYGSFFSKVSASKFQVRFSVGHSMTVNDLLRNPLHLCFSLESVPCQEGYEPLSVEVSSLQLFTDCILEESLSAKLVKYPALCTDNMSVISNVDDVIFKFNSVLNVDNVPNSVKNVVKCNKVFKGRRSRGKWVGSQNEVVVKDGTNVTPHRLIAKDALHQRTTERLRLPDQVMGRPPASDTVSERYADSGFPSTAVSHTTSERTVDDGGLRSDQIGPFPYRYVPY

SEQ ID NO: 76 - DNA, 4759 bp, Arabidopsis thaliana
  source 1..4759: mol_type = genomic DNA
ttcattcatcatcttcctcctctctctcttctctgtatcacccaactaaatcctcacgggattagatccaaagtctcaaactttgatccaaaaacacaaactttgttcaaaagacataaactttgagccaaagtcacaagctttcttggtgaacgatggattacaatccaaatcttcctcctttaggaggaggtggtgttagtatgagaagaagcataagtcgaagtgtaagcagagcaagtaggaacattgaagatatcttctcatctggttcaagaagaacacaatcagtcaacgacgatgaagaagctcttaaatgggctgccattgagaagctaccaacttacagtcgtctccgaaccactctcatgaacgctgtagtcgaagacgatgtttacggtaaccagctcatgagcaaggaggttgatgtaaccaagcttgatggtgaagatcgtcagaagtttattgacatggttttcaaagtagctgagcaagataatgaaaggatcttgactaagctaagaaacaggatcgatagagttggtatcaaacttccaactgttgaagtcaggtacgagcatttgacgattaaagctgattgttacactggtaatagatctcttcctacacttttgaatgttgtgaggaacatgggagagtctgctttaggtatgattggtattcaatttgctaagaaagctcagcttacgattcttaaagatatctctggggttattaaacctggaaggatgacacttttgttgggtcctccttcttctggtaagaccactcttttgttggctttagctgggaaacttgataaatctctacaagtcagtggtgatattacttacaatggttaccaactcgatgagtttgttccgagaaagacctctgcttacattagtcagaacgatcttcatgttggtatcatgactgttaaggagactcttgacttctctgctaggtgtcaaggtgttggtactcgttatgatctgttgaatgagcttgcgaggagagaaaaggacgctggtatattcccggaagccgatgttgatctcttcatgaaagcttctgctgctcaaggtgttaagaacagtctcgtcactgattatactctcaaaattttggggcttgacatttgcaaagacacaatagttggagatgacatgatgagaggtatatctggaggtcagaagaaacgtgtcacaactggtgagatgattgttggacctactaagacactcttcatggacgaaatatccactggtcttgacagttccactactttccaaatcgtcaagtgtctgcaacaaatcgttcacctcaatgaagccacggtgctcatgtctctcctccagcctgctcctgagacttttgatttattcgatgatatcatcttggtgtcggaaggtcagatcgtgtaccaaggaccgagagacaacattcttgagttctttgagagctttgggttcaagtgtcctgagagaaaaggaacagctgatttcctgcaagaggttacttccaagaaagatcaagaacagtactgggtgaacccgaacagaccttatcactacattccggtttcagagtttgccagtagatacaagagtttccatgttgggacgaagatgtctaacgaacttgcagtaccgttcgataagtctcgcggccacaaagcagctcttgtgttcgataagtactctgtctcaaagagggagcttctcaagagctgttgggacaaagagtggctgcttatgcagcgaaacgcgttcttctatgttttcaagactgtccagatcgtcatcattgctgcaatcacgtctacactcttcctgagaaccgaaatgaacacaagaaacgagggtgatgctaatctctacataggagcattgctatttggaatgatcatcaacatgtttaatgggtttgcggagatggctatgatggtttcaagactccctgtgttctacaaacagagggatctcttgttttatccatcctggaccttctcacttcccactttcttgcttgggattccaagctcaatattagaatcgacggcttggatggtggtgacttattactccattggttttgcacctgacgccagccgcttcttcaagcagtttcttctggtgtttctgattcaacaaatggctgcatccctctttaggttgattgcttctgtgtgcagaaccatgatgattgctaatactggtggtgctctcactctacttcttgtgttcttgctcggaggcttccttcttccgaaaggcaagattcctgactggtggggttgggcttactgggtatctcctctcacctatgctttcaacggtctagtagtcaatgaaatgtttgctcccagatggatgaacaaaatggcttcttctaacagcacaataaagcttggaactatggtgcttaatacttgggatgtctaccatcaaaagaactggtactggatttcagttggagccttgctttgtttcacagccctcttcaacattctattcaccttggcacttacctatctcaaccctcttgggaagaaggcaggtttacttccagaagaagaaaatgaagacgctgatcaggggaaagatccaatgcgtagatctttgtctactgcagatgggaacagaagaggagaggtcgcaatggggagaatgagtagggactctgcggctgaagcatcaggtggtgcaggcaataagaaaggaatggttcttcctttcactcctttagctatgtcctttgacgacgtcaaatactttgttgacatgcctggggaaatgagagaccaaggagttacagaaacaagactccaactgcttaaaggtgtgactggtgcatttaggccaggagttttgactgcgcttatgggagtgagtggtgccggtaagactacgcttatggacgttttggccggaaggaaaacaggtggatacattgaaggagatgtgagaatatcaggattcccaaaggttcaagaaacatttgctagaatctcaggatattgtgagcagaccgatattcactccccgcaagtaacagtcagagaatctctgattttctctgctttccttcgtcttcctaaagaagtcggcaaagatgaaaaaatgatgtttgtggatcaagtgatggaattggtagagctggacagtcttagggactccattgttggtttaccgggtgtcacggggctttccacggagcagagaaagagactgacaatcgcggtggagcttgtagccaacccttccatcatctttatggatgagccaacttcagggctagacgctagagcagcggctattgtgatgagggcggtaaggaacacagtggacactggaagaaccgtggtctgcaccattcatcagcctagcattgatatctttgaagcatttgatgaattgatgctgatgaagagaggaggacaagtgatttacgcgggtccattgggtcaaaactctcacaaggtggttgagtactttgaatctttccccggagtgtccaagattccagaaaagtataacccggccacttggatgctcgaagctagctcactcgccgctgagctaaagcttagtgttgactttgctgagttatacaatcaatcagcattgcaccagcgaaacaaagcgttggtaaaagaactaagtgtaccaccagcaggagcatcagatctttactttgctacacaattctcacaaaacacatggggacagttcaaatcatgcttatggaaacaatggtggacgtattggagatctccagactacaatcttgtccgtttcatcttcacattggcaacatctctcttgattggtacagtcttctggcaaatcggaggtaacaggtcgaacgcaggggatctaacaatggtgataggagcattgtatgccgcgattatcttcgtgggaatcaacaactgttcaacagtacaaccgatggttgcagtggaaagaacagtgttctacagagaaagagcagcaggaatgtactcagccatgccatatgccatctctcaagtcacttgtgagcttccctatgtccttattcaaaccgtttactactcactcatcgtctacgccatggttggtttcgaatggaaagccgaaaagttcttctggttcgtcttcgttagctacttctcattcctctactggacttactacggcatgatgactgtttccctcacaccaaaccaacaagtcgcttcgattttcgcctcagcgttttacggtattttcaacctcttctctggtttcttcattccaagacccaaaatcccaaaatggtggatttggtactactggatctgccctgttgcatggaccgtgtatggattgatagtgtcgcagtacggtgatgtggagacacgtatccaagtccttggtggtgctcctgacttaaccgtcaagcaatacattgaggaccattatggtttccaatctgactttatgggaccagtggcggctgtactcatcgctttcaccgtcttcttcgccttcatcttcgccttctgcatcagaactctcaacttccagaccagataaaaccatctctcaaacaacaaagtctctttctttttttgtatcctctgtgttgtttatatgcactataagctttgtatgttctaaatatgtattgtagtgtcataacgaaatttttttgaatatttttatttattgtcttatagatgatgacgaatcggaatcatgtaatataattccacttttttttgtgttta

SEQ ID NO: 77 - DNA, 1642 bp, Arabidopsis thaliana
  source 1..1642: mol_type = genomic DNA
gcttcacgagacaaacgacgaacaacgcaattacgcgttcttatctttctgggtatttcttaattatattactctatataaataaaaatacccagaaacgtaatttcgtcgagttcaaaaattcaattcaaagaataatttctttccataaaaagattgttgtggattaacttctttcttaaaagaatctcatacccgtcgaatcttcttcttcaacctttttctgcgtttttaatattttccctacaaaaagattctcaaaatcgttttacataaacccgatcttgtcaatctccagaaacaaaaaaaaaaaaatggcgatcaagacaaagactagtctaattccaagttgttcatcacctgaggatctaaaacgcgttttgcaaacgctaggttcgagctggggagatgtagttgaagatctggagcgtcttgaggttgttccgttaaaaggagctatgactaacgaggtttatcagattaattggcctactttaaacggtgaagatgttcatcggaaagttcttgttcggatctacggtgacggcgttgaccttttctttaacagaggtgatgaaatcaaaacgtttgagtgtatgtctcatcatggttatggtcctaagcttcttggtcgtttctctgatggtcgtcttgaagaattcatacacgccagaactctttctgcagatgatcttcgtgtagcagaaacatctgatttcatcgctgcgaagctaagagagtttcataagcttgatatgcctggtccaaagaacgttcttctctgggaaagacttaggacttggcttaaggaggctaagaacttggcttcacctatagagatggataagtatcggttggaaggtttggaaaatgaaatcaatttgttggaagagagacttactcgggatgatcaagagattggtttctgtcacaacgatcttcagtatggaaatgtcatgattgatgaagtaaccaatgccattaccatcatagactatgagtattcgagtttcaacccaattgcttatgacattgcaaaccacttttgtgagatggctgctaattaccattcagacactcctcatgttctggactacactctatatccaggagaaggagaaaggagaaggttcattagcacatatcttggctctacagggaatgcaacaagtgataaagaagtagagaggttattgaaagatgcagagagctacactttagcaaaccatatcttctggggactatggggaatcatctcgggacatgtgaacaagattgagttcgattacatggaatatgcaaggcagagatttgaacagtactggcttagaaagcctttgcttcttgaaggatgaagcagattcgcattgaaaagccgatatacaactaaaagtttctgcaattaggtcaaaagaaaaaaagaaaatttagtagactatatgttgctattgttactctcatcagtttgtgtgtttcttcccttctatatagaggtttgttaactctcaaaacagttaaattgagtaaaacttgttctaaacaaagtattatatgataatagaagaagcaccagtggtctagtggcatgatagtaccctgccacggtacagacccgggttcaattcccggctggtgcaattta

SEQ ID NO: 78 - DNA, 1043 bp, Arabidopsis thaliana
  source 1..1043: mol_type = genomic DNA
agtttcaaattagtaaacgataaagtagatgataattaaattcatgtcatagccatgaacgaatgttatgttaaaaaaatttcatgtaagtaaattctttggagttcgattcttcttttgtccttacacaatcaaagatttttctttcaactttttttacttaacagcattaactctttctcagatcttcaattgttttcctaaacgaaattatcattaaattgtttaaaaaatacacatttaatataacatatatcataacaagatatattatatttatgaaaaagagatgtagtactacagcatatggtggcaaacaaacccactaaattcagtaaaatggaacccaccaaatttatctataaataagtccccaaacctctcccccaaaaatgcaacaacactcatctttcccaatataagtttttaccaaacaacaacttttgttttgcctttcctcaaaacataattttgtcttattttctaaaccggtaaaagatgtcgctagctatcgcagaagtttacacggtgaggaagtttcacagagagagtatgaagaaaccggccaaacagacggttaccggcgagggagatgaaaagattggcggaggaagtttcaaggaggcgccggtgaagtcaggtgggtgtagaagattcggacggtggttttttgggaagccgggaatgaagaaaagctctgctaaagtttcggatcccatggcgattgagtgatgaagaagaaattaaaacttttctcttctttgccttttttttttttctttctttattttgttttattttcattggtctttttttaatggctttttctagtgtcttctctttttctttattgggtgattttataaatagtcggtaaacattgtacaatatgaactacaaaaatatgagaaaatctatatatgtatgtagaatggatgtattccctaaataccacagctagtttgataagttttatgccaaaccaactaaacttgtatgccacgatatttcgtatttcagaaaatcgaaaattgttatttttt

SEQ ID NO: 79 - DNA, 1428 bp, Arabidopsis thaliana
  source 1..1428: mol_type = genomic DNA
acaaaaaccatttgaattttctttcttcttcaaaagttcgaaacttttttttttccggcaatggagggactagttccggtacagagacttccaattaaagtggcttcaccttctctgtatcggtgtaacaattctgtctcaatcagacgttcaatttcaggttttgccatggacaggaagataaactttagggctccgtcgcaattctcgatccgagctcaacagtcggatttgaaggaaagcttagctgtgtcttcttcatcagtagaggataaaggaaatgttcttagaatcaaggaatgggaagtagagatgtatcaggaggaattagctattagtcaaggtattaggataaggagaaaaccaccaagtaaggctcctttgggatactctggaccatttgagttgagattgcataacaatgatgctgattctcctcgtaatatcttggaggagatcacatggtacaaagacgtagaagtttcccggatgaaggagctaaatccgcttgacgtgctgaagaaagctgtagaggatgctcctcctactagggattttgttggggctcttaggatggctcataaaagaactggcttccctggcttgatagctgaggttaagaaggcttctccaagtagaggaatcttaaaagagaattttgacccggtcgagattgctcaagcttatgaaaaaggcggagcagcatgcctcagcgttttgacagaccagaagtatttccagggaggctttgaaaacttggaagcaataaggagcgctggtgtgaagtgtccactattatgcaaagagtttgttgtagatccatggcagatctactatgctcggactaaaggcgcagatgcagtactgcttattgctgctgtattggctgacctagaaataaccttcttgcttaagatttgcaagaagcttagcttggctgcccttgttgaggtacatgatgagagagagatgggtcgtgtacttggaatagaaggaatcgagcttgttggcatcaataaccgaagtcttgaaacatttgaagtggacatcagtaatacaaagaagcttcttgaaggagagcatggtagacaaatccgtgagagagacatgattgtggttggcgaatctggtctgtttacaccagatgacattgcctatgtacaagcagccggagtcaaagcagttttggttggagaatccattgtgaagcagaacgaccctgagaaaggaatagctggactttttggcaggaacatttctcatacttagagaccatatcataatacatctccaaatacgtttcctagtacatttgttttgtatcttgctctgtgagtattgaggaaagactagaaaggtttgttggttctgatgtttaagacattttcaaaaaaccatcgaataaactgaatcgaaatcgatttacag

SEQ ID NO: 80 - DNA, 1388 bp, Arabidopsis thaliana
  source 1..1388: mol_type = genomic DNA
agataagagcgaaacaaattacaaaattgaattacacaataatgtcctctaagcgacgactaccggtgaaatattttataagaaaacaaaaacaataattaacaaacaaaggcgacacctttagattcgacaagacgaccattttagaaaaagcttctcaaattctctccttatccccaaaaattcaaacttttttctctttggaaaattctgaggcaaaaatgcggcgtaattgctgccatgtttcatttgcttcaaccctcaagatccttaattttgtccaagctttcattggtgtttcgatcattatctactccatatggatgctccatgaatacagccgtcaccttcccgtggacccgcctccgtcagcttcatcaagctccggaaccgagatcgctactagtgtatctgagcccttgaagaatcctattgattttgtggcgagtatcattctcgggtctaatggtggtgatcatgggtttaacctacgctcgttggaccttcctgctccatggttcatctactctttcatggcggttggtatattggtctgcattgttaccttcattggtttcatagcagctgaagcaatcaatggctgttgcttgtgtttttactctattctcaaaactctgctcattctacttgaagctgcacttgttgcatacatcgctattgaccgtcactgggaaaaggatcttccgtatgatccaactggagaacttagtagtcttagggctttcattgaagaaaacatcgatatatgcaaatgggtggggattgctgtggtagcagtccagctactgtcattgctactagccatggttctcagagcgatggtttcaaccccgaaacccgaacttgacgaagaggaagatgatgagaacccaaggagtagaacttgggacccacttcttggtccgcaaggaaaccaagcgcctgctggctcaagcaagattgaaaactggagctcccgaatcagagaaaagtatggtttgaaccagagtccaccggtgaacccgaaaggttgatgaagccaaataatcatgtttctaaaactgcatgtgtccatatggtctctgtgaagctctctttctctatgttttgctctttgcaacttctcgagtgtgcataaacatttactcaaaacagtgctgtattgtgtttacacaaacggcataagcatcttcgtttgtgtgtttgcttgtacaaacaatcctgtgaacagtttgaagttagcatttccactataacgtttcgattcaatttataatgaagaaaacaaaactaaaaattgaattggacatcataaacagattaatgtaaaatgtatatgtaggttaaactctttcttagattatatcatctatatatgtttcattatt

SEQ ID NO: 81 - DNA, 1145 bp, Arabidopsis thaliana
  source 1..1145: mol_type = genomic DNA
gactccattattatccctctctctacaaaaaaaacagtagagagagatatagagagcatcaatggcgtcgtcgtcaagactttgcgattcgtgcaaatcgacggcagcaactctattctgccgcgcagacgccgcgtttctctgcggcgactgcgacggtaagatccacacagctaacaaactcgcatcacgtcacgaacgagtttggctatgtgaagtatgcgaacaagcaccagcacacgtcacgtgcaaagctgacgccgctgcgttatgcgtcacgtgcgaccgtgatatccactcagctaatccactctctcgccgccacgagcgcgtaccaatcactcctttctacgacgctgtaggtccagcaaaatccgcttcctcctccgtcaatttcgtagatgaagatggcggtgacgtcactgcttcgtggcttttagctaaagaaggaatcgaaatcactaatttgttctccgatcttgattatccgaagattgaggtaacgtcggaggagaatagctccggtaacgacggagttgttcctgtgcagaataagttgtttcttaacgaagattacttcaatttcgatctctctgcttccaaaatttctcaacaaggattcaatttcatcaaccaaactgtttcgacgagaacgatagatgtaccgttggtgcctgaaagtggaggagtgacggcggagatgacgaacacggagacgccagctgtgcagttatcaccggcggagagggaagcaagggttttgaggtatagagagaagaggaagaatcggaaatttgagaagacgattaggtatgcgtcgcgtaaagcttacgctgagatgaggccgagaatcaaaggacgttttgctaagagaacagattcgagagagaatgatggtggagacgtcggagtttatggcggattcggtgttgttccgagtttctgatattttccggtgaaagaaacatggtagtagtatatcggttaatagcagattaaggataattaaaactaaaatgtttcctgatttaatcaggggctaagttattgttagaagattgttgttttttgaattaattctcacaattgtatcctaaattatatagtttacttaatgttgaactaataaattttgatttacaatc

SEQ ID NO: 82 - DNA, 2268 bp, Arabidopsis thaliana
  source 1..2268: mol_type = genomic DNA
atggcggaatcaagctctcctctccctcctctttgtgaaaggatctcacacaaaagctatttcttaagagctgtggatctcactattctaggtcttctcctttctcttctattgtaccgtatcctacatgtgaaccaaaaggacaccgtttggatcgtggctttcctctgtgaaacttgtttcaccttcgtatggttgcttattaccaacataaaatggagtcctgctgattataaaacatatcctgaaagacttgatgaaagggttcatgaacttccaccggtagatatgttcgtgaccacagctgatccagtaagggagccaccgcttatcgttgtaaacacagtgctttcactgttagctgtgaattatccggcgaacaaactagcttgttatgtgtcggacgatggatgttcacctctcacttacttctctctcaaggaagcttctaagtttgccaagatttgggttcctttctgcaagaaatacaacgttagagttagagctccttttatgtacttcagaaactctccggaagcagcagaaggttctgaattcagtaaagactgggaaatgactaagagggagtacgagaagttaagccagaaagtagaagatgccactggaagttcccactggttggatgcagaagatgactttgaagctttcttaaacacaaaatcaaatgatcattcaactatagttaaggtggtatgggaaaacaagggaggtgtgggagacgaaaaagaggtccctcatgttgtttacatttcaagagagaaaagaccaaatcactttcatcattacaaagctggagccatgaactttctggtaagagtgtcagggttgatgacaaatgcaccatacatgttgaacgtagactgcgacatgtatgtcaatgaagcagatgtggtgcgacaagcaatgtgtatatttctgcaaaaatcaatggattcaaaccattgtgcttttgttcaataccctcaagatttctatgattctaatgtcggtgaactcaccgtcttacaattatacttgggacgaggaattgcgggaatccaaggacctcagtatgcgggttcaggatgcttccatactagaagagttatgtacggtctttctctagacgatttaggagacgatggaagtctttcttcaattgctacaaggaagtatttagctgaggagagtctaacgagagaatttgggaattctaaggagatggtgaaatcggtggtcgatgcgttacaaagaaaaccatttccccaaaaaaaccttaaggactctctagaaacggctcaagaaatgggacattgtcactacgagtaccaaaccagctggggaaaaaacatcggttggttatacgattcaacaacggaagatgtgaacacgagtatcggaattcattcgagagggtggactagctcatatatttttccggatccaccggcgtttcttgggtgtatgccacaaggaggaccggaggtaatggttcagcagcgacgatgggccacgggactgctcgaaatccttttcaacaaacaaagtccgttgatcggaatgttttgtcggaaaataagatttcgacaaagcttggcttatttatacgttttcagttggggtctaagatcaatccctgagctcttttactgtctcctgcctgcttattgcctactccacaactctgctttatttcccaagggagtttacttaggtataatcatcacacttgtggggatacattgtctttacactttatgggaattcatgaaccttggtttttccatacaatcgtggtatgtcactcaatcatttgggaggataaaaacaacttgtagttggttatttagcgtccttgatgtcatactcaagcttcttggaatatcgaaaaccgtcttcatagtcactaaaaagactatgcctgagaccaagtcagggtctggatccaaaaaatctcaacgagaagttgattgtccaaaccaagattccggtaaatttgaatttgatggctcgctttatttcttgccgggcacattcattgtgttagtgaatctagccgctctagccggttgtttggtgggtctacaaagtcgcggaggaggtggttcgggtttggcagaagcctgtggctgtattttggtggttattttgttccttccatttctaaagggtatgtttgagaagggaaaatatggtatcccattttctactctttctaaagctgcctttttagcagcgttatttgttgttttatctgtgggaaactag

SEQ ID NO: 83 - DNA, 1381 bp, Arabidopsis thaliana
  source 1..1381: mol_type = genomic DNA
catatttatactactagtatataagttaagggtttaagcctcttctcttccttctttctcttagccatcacatcgataatggcttctcttctaacaaaacccaaacccgttttcctctgttcaccatcgttatctccaagaactttgaacacagcaacaccgtcattgaatttcaccagaatttcattcacccatcaccaaaagcttgctcctttcaagcctcctagtctcgttgttgcattctctgaaaagggtttgaagagagatgtcaccacagctgctgcagcgacggagggagattacagaaggataatgttatctgatgtgttggtgaagaagaaggaaaaagtagtttggtgggagagagaatggaaagctatggactttggagctgttgctgtcgttttgtctatgcatttgcttagtcttttggctccgtttcaattcaattggagagctgtttcggttgcttttgggctttatatcgttacaggtcttctggggattactctgtctttccataggaatctttctcataaagccttcaagctacctaaatggcttgagtacttgtttgcttattgtggagctcaagctcttcagggaaacccaattgattgggtgagtacacataggtaccatcatcagttttgtgattcagacagagaccctcatagcccacttgatgggttttggttcagtcacatgaattggatgtttgataccaatacaatcacccaaaggtgtggagagcctaataatgttggggacttggagaagcagccattctatcgattccttcgaaccacctacattttgcatccgctggctctagcggttgctttatacgcaatgggtggctttccattcatcgtttggggaatgggtgtaagaatagtatgggtatatcatataacttggctagtgaactcagcttgtcatgtatggggaaaacaagcatggaacacaggcgatttgtctaagaacaactggtgggtagcagctctagcattcggggaaggatggcacaacaatcaccatgcttttgagttctcagctcgacacggcttagaatggtggcaacttgatatgacttggtacgtcgttaagttccttcaagccatcggtttagcaactgatgtcaagctcccatcggaagctcagaaacaaagaatggcattcaccagcgactgatcttaaaaaactacatggttatgcctaaagtcaaaactgtcggttcgattgaagctatgaaggttttaaaaaaggattttgttctgcttttttgtgtttacttaaaggtatatatctgtgcaagagattgtatgtgacaaactgattatgaataatatctataattacattcaatacaaaaggaagc

SEQ ID NO: 84 - DNA, 980 bp, Arabidopsis thaliana
  source 1..980: mol_type = genomic DNA
aaatcactcaccacataaagtaaaagtctcatctcttcataaaatagctttaaaccaatcaagtagagtttcttctcaagtctttttattttatttttatcaatggcttcttcagcagtgtctctccaatccatctctatgacaactctcaacaatctttcatgtaatcaacaatttcatcgaagctctcttcttggttcctctaaatccttccaaaatcttggtatctcatctaacggttcagatttctcctatccatcaagtttcactgccaagaagaacctcactgcttctcgagctctctcccaaaacgggaatatcgaaaaccctagaccaagcaaagttcaagaactgagtgtgtacgaaatcaacgaattagatcgacacagccccaagattcttaaaaacgcattcagcttaatgttcggtctcggagatctcgtaccattcacaaacaaactctacacaggcgatctcaagaaacgcgtgggcatcacggcaggtctctgcgtcgtcatcgaacacgtcccagagaagaaaggtgaaagattcgaagctacttatagcttctacttcggagactatggccacttgtccgttcaaggaccatacttgacttacgaggattcgttcctcgccatcactggtggtgctggaatctttgaaggtgcctacggacaggtcaagcttcaacagcttgtgtatccgacaaaactgttctacactttttaccttaaagggttggctaatgatttgccgttggagctcaccggaacaccggtaccgccgtctaaggacatagagccggcgccggaagctaaggcactggagcctagcggagttataagtaactataccaactaattcatgaaattaaaatgtttctcgtatcgctgtgtaatgatataaagatttgtagttttgtgctcttatctgtaataaaatcattgaggaataatatctcgagtatgttttaagtc

SEQ ID NO: 85 - DNA, 2706 bp, Arabidopsis thaliana
  source 1..2706: mol_type = genomic DNA
ccggttacagctacaccgccgttttctctctccgccgtcttttctcttcttctccgactgaatctgtgaaggtgaatttcggagttgagaaagagagattagcgtgtaatggcgatcgataatggcaagcttcaagaagaagaagcctcatctgttactcgattctataacattattttgggttgggactataaacagcttactaaagagaatgagaggaaaaatagaaaggattctaaagagaaattgaatgttgtaaagaatacttataaagatgttgatgattatttcgagacttttgaaccattgctcttcgaggaagttaaagctcaaattttgcagaataaagatggtgaagaagcatcggtgtgtaaaatgagattggtaatggagtgcaacgagggcgaagggtttcactttctgttagtcacatacgaacatgaggaggatgaatatcttgctcaaaatgatcttttattgctatcaaaagaagaggttaaagggaattcatttccttcatcttatgggtttgctgtagtggaacatcgtcaaaataatcttcttcgtcttcggatgtatttagctgaagacattgtgcagataaccaagaatactaaatcctctagaacaaagtcatttatccaagcgctttcaaatatgcgttctcttattacatcatctgccagccctattgacaaaagggtattcagtttaaagttatgtggtttatcaaccattattcgggaatatatagcactacgatcagttagttcgctccctttcaaggatttaatcttcactgcagcagaaaaatcttgtggttttggagatgaagcatggaaaatatctggacctctgaatgaattctttaacgaaaaccttaacaaatcccaaaaggaggcaattgatgttggtctatcaagaaaatccttcgtcttaatacagggtcctccaggtaccgggaaaactcagacgattcttagcatacttggtgctattatgcatgctactcccgcaagagtccagtctaagggtacagatcatgaagtaaagcgtggtattcagatgactatccaggaaaaatacaatcactggggaagagcctctccttggattttgggtgtcaaccctcgagatgctattatgcctgaagatggtgacgatgggttctttccaacctcaggaaatgaattgaaaccggaggtggttaatgcgagtcggaagtacagattacgtgtacttgtctgtgctccatcaaactctgcacttgatgagattgtgttgcggcttctgagttcgggtcttcgtgacgaaaacgcccagacatatacacccaaaatagtacgaattggtctcaaggctcatcactctgttgcgtcagtatcactggatcaccttgtggcacaaaagcgtggctctgccatcgataagccaaaacaagggactacaggaactgatatagatagtatccgcactgcaattttggaagaggctgcgattgtgttcgctacccttagcttcagtggctctgcacttcttgctaaatctaaccgtggtttcgatgtcgttataatagatgaagctgcgcaagctgttgagccagcaactcttatccctttggccactaggtgcaaacaagtatttctggtaggggatccaaagcaactcccagctactgtaatctcaactgttgctcaggattctgggtacggtacaagcatgttcgagagacttcaaaaggctggctatccagtaaaaatgttgaagacccaataccggatgcatccagagataagaagctttccgtcaaagcaattctatgaaggggcactagaagatggatctgacattgaagctcagactactcgtgactggcataaataccggtgctttggtccattttgcttttttgatatacatgaagggaaagagtctcaacatccaggagcaactggttctcgggtaaatctagacgaggtggaatttgttcttctcatctaccacagacttgtaaccatgtacccggagctgaagtctagttctcagctagctattatatcaccgtataactaccaagtaaaaactttcaaagatcggtttaaggagatgtttggtacagaggcagaaaaagtggttgatatcaacactgttgatgggttccagggaagggagaaggatgttgcaatattttcatgcgtcagagctaacgaaaatggacaaatcggttttctctctaattctcggcggatgaatgtggggattacacgagccaagtcttcagtattggtcgttggttcagctgcaacattgaagagcgatccactttggaaaaaccttatcgaaagtgctgagcaaagaaaccgattattcaaggtttcaaagccattgaacaatttcttcagcgaagagaatctggagacgatgaaactgacagaggacatggagattcctgatgcaccgttgtatgaagacgaatctcttccggtggcaccatatggtggagatgatgactttggagatggtgatgctgatcaagacgatgtagccatggccggagaagactaaactctaaaaaccttttcgttattagttagaactttgatattacaggaagtggttgaacatctaacaatatctacacttattatttgtatggttttattttggtttacatacagtaataagaatgtctttacttgtgctacg

SEQ ID NO: 86 - DNA, 1543 bp, Arabidopsis thaliana
  source 1..1543: mol_type = genomic DNA
ctctttctttgtgggttctagtttgtgtgtatatatactatatgcacatacacataggaagatatgatgggttacgagcagatgaatcagatgacaatgacgacaacagcgatgatgaagaattacaataagaagggactaatcaatactccacagaagaaaatgacgaggagaagtgtgtcggctattgatggtggtgcagctgcgacggctaaagaaggagatcgccgtcagaatatcaagactcttgatcttagcggcatgtccttggcttctctctctgcctcttctatcaacttagcttcaatctccaaactcgatctctccaacaacaatattcagaaaattccggaatctctagtagcgagaatgttaaatttgtgggcattggatttgcaatccaatcagctaaaaactcttccaaactccattggatgtctttccaaacttaagtttcttaatgtctccggaaattatctccaatctctccccaaaactatagaagattgcagatcgctggaagagctgaacgccaacttcaacgagcttacaaggctcccagacgcgatagggtttgagctaacgaatctgacgaagctctccgtcaactcaaacaagcttgttctcttgccaaactccgttagctacttgacgtcgctgcgtgtgctcgacgcgcggctaaaccgccttagttccctccctgaggatcttgagaacctcgtgaaccttcaggtcctcaacgttagccagaacttccagcacttgacgacgttaccttactccgttgggttgttgatatctctcgtggagcttgatgttagttataacggaattacggttttaccagactccctcggctgtcttcgccggattcagaagctatccgtggagggtaatcccctcatttccccaccatttgaagtggtggaacaggggttggaagcattgaagcagtatatgagcgagaagatgaccgagtcttataagaaaactccgaccaagaaaaagtcttggggcattggtaagctcgtaaagtacggcctgagctcttctccggggaggagtaccggccgtgaagacgggaaggaaggcttcatcaatgtatctgattaccgccaaatcgacggaatcgcctcaccgcgacatgtgtccctcttcaacccgcgacgcctcttgtctccactctccgcgtatttctctcctcctaggtattagcttatttaggtgtgttgtctgtctttttttttttcatcttctacatacgattccataccgttttcactgttacatccatgtagtgttaaattgttaatgttcttttacgttgttttctgcatgcttggtgtgaggataaaatttaattaaattgtgtatacgtttttttttccctgtctcatagaatttttctatggcttttctcatttcgttgtattgtagttcaattttgttgaacacatttgtaaactattacatagacacttaatattttactatgtatataatgtaaaatcgcatttttgaaagtactccaccatccttctca

SEQ ID NO: 87 - DNA, 1543 bp, Arabidopsis thaliana; identical to SEQ ID NO: 86
  source 1..1543: mol_type = genomic DNA

SEQ ID NO: 88 - DNA, 3675 bp, Arabidopsis thaliana
  source 1..3675: mol_type = genomic DNA
ctttcactcttcccttctctctccccaaaataaatcagaaacctatcaacattcttcaacagccacaagtaaaatttatagacatttctgtctgaagaagaaaaagattgaatttttttgcttgttgtgggttctttaatggatccaagaacaagacttgactatgctctgtttcagctcacaccaactagaacaagatgtgatcttgtgatattctctggtggtgagaatgagaaacttgcttctgggatttttcaacctttcgttacgcatctcaagagcgttagtgatcagatttctaaaggtggatactccgttactctccgtccttcctccgttggtgttccttggtttactaaagtgacccttcagagatttgtgcgatttgtgactactccggaggttcttgagaggtctgtaacattagagaaggagattgagcagatcgaggattcgattcaagctaatgcagccgccattgccggtgaagctgaaggaaacgagttgggtggtacatggacttctcaaaagtctacggctttatcaaagacgaaaggggaaactgatggagacactgtggaagaaaattcgaaggttggtcttcagcgtgttctggagaaccgtaaagcggctttgtgcaaagagcaagcgatggcttatgctcgagctttggttgttgggtttgaacttgactacatggatgacctcttttcgtttgctgatgctttcggagcttcgcggttaagggaagcgtgtgttaactttgtggacttgtgcaagagaaagaacgaggatagaatgtgggtggaccaaatcactgctatgcaagcatttcctaggcctgaattaacgttcatgggtgactctgggatcgtactcgctggtgaagagaatgatttgttgaatgctacaaacgtaaagcatggaaactctatggatgcctcgagccagggtagctttgagactggccaagaagggagagctcaaatggcaatgccgtggccaaaccagtttcctcagtacatgcagaactttcaaggacatgggtatccgcctccttatatgtttccggggatgcaaggtcaatcaccatatttccatgggaatatgcaatggcctgtaaacatgggagatgtggagtcaaatgagaagtcttccaagaagaaaaagaagaagaagaagaataagaagaagtcgaagcaagatgaatctgccgagccaagcgataattccagtactgagaccgaatcagaagacggaaatgaaggaaagaaacaatccaggaaagtggttatccgcaacataaattatataacttcaaagaggaatggagcgaaggagagtgattcagatgagtctggagaagaagaagggtttgtggatggagattctattaagcagcaagtagaagaagccattggctcagtggagagacgtcataaatcgacttcacaccgtcagaggaaacacaaaagtcacaacggtgatgatgattcaagtaacaaggaaactaaggggaatgataattgggatgccttccagaatcttcttttgaaagacaatgattcagagccagaagaattactacgtatatcatcaactgcgttaaatatggcgtctgaagttgtgagaaagagagaaccgccttctgatgattcattcttggttgcaattggaaatgaggattggggaagagaaaccagcattgagaaattcaatgcaggtgagaatgttcggataataaggaaagggaacaactatgacgaggagatgttgaatccgggtagaagcgatgaatcaagaagctattcgcaggcagagatgtcggttcatgatgggaagctcagaaccagaaatgaggcggaagaagactggttcatacgtaaccaagctggtccagaaacagatccaagtcttgtcaaaacatttgtaggagaccatttccacttaaataagagcagtgagagagatgtcctgaccgatgactctttcatgatccattctcgtgttgagaaccaagtagaagattctcggttaaggacagaaatcatggacttagacgtttacggaaccacccaacaagaaaacagtgccccggagaacactccgcatgaaccagatgacctatacatggttcttggacgggaacaagatgttaaacctacattgttaccatggacccctgaaattgactttgagactaacactttggctcaaagaacaagcagaatcgatttgataactgccacaaaggcctctgcaggtgaacaaaccttagatggtaaagaaaagaagagtcgtggtatctccaaggggaaggatgcaaagtcaagagcatcaagtagacctgacccggcgtcaaaagccaagagacctgcttggggaagtagagctgctgtctccaagtccaaatccgagatggaggaagagagaaagaagagaatggaggaacttttaattcagaggcaaaagagaattgcggagaagagttccggtggtagtgtatcaagttctttagcgtccaagaaaactcctactgtgaccaagtcagtgaagagctcgataaagaatgagaagactcctgaagccgcgcagtcaaaggctaagccagtactgagaagttccaccattgagcgccttgctgttgctcggaccgctccaaaggagccacagcaaaaaccagtaatcaaaagaacatcaaaaccttcaggatacaagacagagaaagctcaggaaaagaaatcgagtaaaataggtcaatcagatgcgaaaagtgtggaactttctcgtgacccgagtctcgaaatcaaggaaacggtggtggaagattcacattcttacttgtcagagaagcaagttgatgcacttcctgctgttgcttctgttgatgatttcaaagacattaaagaattgcatagcttgccatcagaagaaacggccagagtaaagaacagaccgaatgaaatcatagcagagaaagtacaagatcagacgaagatcgatgatcaggaaacagtgaagaatacatctgtttctgaagataagcaaatcaccacgaagcattactcagaggatgttggagaagtccaggcttcacaggaaaaaccggtgtctccaaagaagtcggtgactttttcagagacaaacatggaggagaagtattatttctcaccagcggtctcagagattgacatctcaacgccacctgctactgaagcagatcattcgaggaagaaatggaacagtgaagagacgtctcccaaggcaacggctaaagtcttcaggaagcttcttatgttcggaaggaaaaagtaaaaccgacgttggaattcttcttctccggcatcatcgaacctttgttttgagacgacgtcatgttgagttcagagaacaatatatggggatgtgttggaatcatgaatcgtaggttaaatcctacaagaggaaaagcttcaggagacagagaagatgaagagaagagaagaaaggaagaagaagaagaagtcgtgacaaagaaagtcagctaatagacatatctccgctatttaaagtcgagtctaagcctttatacacttaaaggttgagggttcgaacccttgttatgtctttttgccctaaaagaaaaaaactttctcatgaaattccgtgagatgattcttccattctaagcatttg

SEQ ID NO: 89 - DNA, 3675 bp, Arabidopsis thaliana; identical to SEQ ID NO: 88
  source 1..3675: mol_type = genomic DNA

SEQ ID NO: 90 - DNA, 3727 bp, Arabidopsis thaliana
  source 1..3727: mol_type = genomic DNA
atatccagataattaattctctcataatatcttctccacaatttcaactcttctaaagtctaaaccatgaagttactctcaaagacctttttgatattaactctcaccttcttcttctttggcattgcactagcgaaacagagctttgaaccagagatcgaagctttgaaatccttcaagaatggtatttccaacgaccctttaggagtattatcagattggaccatcatcggttcgttacgacactgtaattggaccggaatcacctgcgatagtaccggacatgtagtctcggtttccttgctggagaagcaacttgaaggtgttctgtctccagccatagcgaatctcacctatctccaggttcttgatctcacttcaaatagttttaccggcaaaataccggctgaaataggaaagttaaccgagcttaaccagcttattctgtacctaaactatttctctggttcgattccttctggaatctgggagcttaagaatattttctatcttgatcttagaaataatttgttgtccggtgatgttcctgaggaaatctgcaaaaccagttctttggtattgattgggtttgattacaacaacttaaccgggaaaataccagaatgcttaggagatttggttcatctccaaatgtttgtagcagctggtaaccatttaactggttcgattccggtatcaattggtactctggctaatttaacggatttagacctgagtggtaaccagttaaccggaaaaataccgagagattttggaaatctcttgaacttacagtctctcgttttaactgaaaacttgttggaaggagatataccagctgagatcggaaactgctcgagcttggtccaacttgagctttacgataaccagttaaccgggaaaataccagctgaattagggaatttggttcagctgcaagcactccggatatacaagaacaaacttacttcttcaattccatcttcattgttccggttaactcagttaacccatttggggttatcagaaaaccatttggttggaccgatatcagaagaaatcggttttcttgagtcacttgaagtcctcacacttcattccaacaacttcacaggagagtttccacagtccatcacaaacttgaggaacttgacagtcctaacggtggggttcaataatatttccggtgagctcccggcggatctagggcttcttacaaaccttcggaacctttcagcgcacgacaatcttcttaccggaccaataccttccagcataagtaactgcaccggtcttaaactcctggacctgtctcacaaccaaatgactggcgagatcccgcggggtttcggaaggatgaatcttacgttcatttctattgggaggaatcatttcaccggtgaaattccagatgatatcttcaactgttcaaacttggaaactcttagtgtggcagataacaacttaacaggaactctcaagccattaattgggaagcttcaaaaactcaggattttgcaagtttcatataactctctcactggaccgattcctcgagaaatcgggaatctgaaagatttgaatatcttgtaccttcactctaatggtttcacagggagaatcccgagagagatgtcgaatctcactctcctccaggggctaaggatgtattcaaatgatcttgaaggtccaattcctgaagaaatgtttgatatgaagctactctcagttcttgatctttccaacaacaaattctcaggtcaaattcctgccttgttctccaagcttgaatcgcttacctacttgagtcttcaaggaaacaaattcaacgggtctatccctgcaagccttaagtcgctttcgcttctcaacacattcgatatctccgacaatcttctcactggaaccatccctggagagctgttagcttctttgaaaaacatgcagctttacctcaacttctcaaacaacttgttgactggaaccatcccaaaggagcttggaaagcttgaaatggttcaagaaatcgacctttcaaacaatctcttttctgggtctattccaagatctttacaggcctgcaaaaatgtgttcacactggatttttcgcagaacaatctctcgggtcatataccagatgaagtcttccaaggcatggatatgatcataagcttgaacctttcaaggaacagtttctctggagaaatccctcagagcttcgggaacatgacgcatttggtctccttggatctctctagtaacaatctcactggtgaaattccagagagtctcgccaatctttcgactctgaaacatctcaaactagcttcaaacaacctcaaaggccatgttcctgaatccggggtgttcaaaaacatcaacgcctctgatctaatgggaaacacagatctctgtggtagcaagaagcctctcaagccatgtacgatcaagcagaagtcgagccacttctcgaagagaaccagagtcatcctgattattcttggatcagccgcggctcttcttcttgtcctgcttcttgttctgattctaacctgttgcaagaaaaaagaaaaaaagattgaaaattcatcagagtcctcattaccggatttggattcagctctgaaactgaagagatttgaaccaaaagagttggagcaagcaacagattcattcaacagtgccaacatcattggctcaagcagcttaagcacagtgtacaaaggtcagctagaagatgggacagtgattgcagtaaaagtattgaatctaaaggaattctctgcagaatcagacaagtggttctacacagaagctaaaacattgagccaactaaaacatcgaaacctggtgaagatcttagggtttgcgtgggaaagcggcaaaacgaaagctttagtgcttccatttatggagaatggaaacttggaggacaccattcacggctctgcagcaccgattgggtcgcttttagaaaaaatcgatctttgtgttcatatcgcaagcggaatcgattatcttcattctggatatggttttcccatcgttcattgtgatctgaagccagctaatatactccttgacagtgaccgcgttgctcacgtaagcgattttggaactgctcggattctaggtttccgcgaagatggaagcaccacagcttcaacatcagccttcgagggtacaattggatacttagctccagagtttgcttatatgaggaaagtgacaacaaaagccgatgtattcagcttcgggatcataatgatggagctgatgacgaaacagagaccaacttcgttgaatgatgaagattcacaagacatgactttgcgccaattggtggagaaatcgattggaaatggaagaaaagggatggttagggttcttgatatggaactcggggactctattgtttctctgaaacaggaagaggctattgaagactttctgaagctttgtttgttctgtacaagctctagacctgaagatcgacctgatatgaacgagattcttacacatctgatgaaacttagaggcaaagcgaattcatttcgagaagatcgtaacgaggatcgagaagtttagcagcaaagcttttttgatgacattttttcgactttgccaaactctgttacgaaggttgaatactttggacgtaaaacgttctgattttgcttttcgttatgtatttctgttttatataaggttgaaatttggttttgat

SEQ ID NO: 91 - DNA, 1177 bp, Arabidopsis thaliana
  source 1..1177: mol_type = genomic DNA
caaaacaaaacgccattttttgtcgattcttcgtcgtcctcctttgaaattcacaccaatttgtctctcttcctagagaaacaaaagattattcgaaactcgggaaagtatcatccggtcaccggaaaattgattatttccgatgccaataggtgaccgtcagaatccgagtgtggagaagaagaagaacctcttcaggctatgtccgttttggcagaggagaagcaccacttcttcatcttcaacacagaatccaaaccaaaactaccgtagccgccatggaaatcggaatacagatatttccgccgtctctaagcctccgttgactatgtcttccgtcgccagatcacttcttccagctcgccgtcgtctccgactagatccttctagttatctgtatttcccttatgaacctggaaaacaagttcgcagcgcaataaagcttaagaacactagcaaatctcatactgcatttaagttccaaacaacggcacctaagagttgttatatgcgtcctcccggaggtgttttggctccaggagagagtgtttttgctactgtgttcaagtttgtggaacatccagagaacaatgaaaagcagccgttgaatcagaagagcaaggttaagtttaagattatgagcctgaaagttaaaccaggagtagagtatgtgcctgagttgtttgatgagcaaaaggatcaagtagcagtggagcaggttcttcgggtcatttttattgatgcggaccgcccaagtgctgcattggagaaactgaaacgtcaattggatgaagctgaagctgcagttgaagcaagaaagaagcctcccccagagacagggcctcgagttgtcggggagggtcttgtcatagacgaatggaaggagagaagagagaagtaccttgctcggcaacaagtcgaatccgtagattctttgtcctaaacgcagagagcaatgtggacttgttctgcagatcatgtacataatttattatccctcgattatgtatttatctctagacgattactttgtggttcttgtatgtctctgtttgttgtgtgattcatgccggttttttctccttcatcaaattttgtttcggtcgtttttagttgatctagaatcgaaccagagtttgttcagtatttagttacaaatgaaaaatcctgttatacc

SEQ ID NO: 92 - DNA, 1115 bp, Arabidopsis thaliana
  source 1..1115: mol_type = genomic DNA
tactcacttttacaactaactcataagtaaaacacagacagtttttagatggctaagatatattccccttcttttcccggtactctctgtctttgcatttttactctcttgacgctaatgttcattcgggtttccgctcgacccgcgacattcgtcgaggatttcaaagccgcctggtcggaatctcacatccgtcaaatggaagacggaaaagctatccagctcgtccttgatcagagcactggatgtggatttgcttccaaaagaaaatatctattcggacgagtgagcatgaagatcaaactcattcccggagactctgccggtacggtcaccgctttctacatgaactccgatacggccacggtgagagacgagctagattttgagttcttgggaaacagaagtggtcaaccttactcagtgcaaacaaacatatttgctcatggcaaaggagatagagaacaaagagttaatctttggttcgacccatctatggattaccacacttacactatcttatggtcacacaaacacattgttttttacgtagacgatgtgccaataagagaatacaaaaacaacgaagccaagaacatagcttacccaacatcacaacctatgggagtatactcaacattatgggaagcagatgactgggcaacacgtggtggattagagaaaattgattggagcaaagctccattttatgcttattacaaagatttcgacatcgaaggttgtcctgttcctggaccaaccttttgtccatcgaaccctcataattggtgggaaggttatgcctatcagtctcttaacgccgttgaagctcgacgttaccggtgggttagagtaaaccatatggtttatgattattgtactgaccggtctaggtttcctgtcccaccacccgagtgtcgtgcttgaaaataattgcatacgtacgttgcaatgatcatgtttcgtcttgtacgagattttatatataaattgtgggaaaatgtggattgtattgtcctcttacgcaattgtgcagacgtacgtgagtgtgtatagatataattgtgatttgtggttatttgaaatttttataaacatagatgaattctgtgaag

SEQ ID NO: 93 - DNA, 1981 bp, Arabidopsis thaliana
  source 1..1981: mol_type = genomic DNA
actggtgtgcgcactaagcaagcatactctattatttgtcgaaatcacaagagccagccagtctctctgagttctatcacaatcttcttcttcagagcttattgagtaatggcggcttcaatgcagttctacggagttaaaacaccagaacttgccttaaactcaaaaaggattgagtttagctcaaaggggctcaacttctcagcactcgtgtcctctgctcgtgtattctctagaaacgtagatcgttcttgtaagaacatcgctctgagagttacttgtgaagcgggaagagtggagctgctagagagaaaagcctcagagactttcaagttaaacaaaactgagaaaaaattgacctgtgtaatgaaattcggtggctcatcagtggcatcagcagaaaggatgatacaagttgccaaactcatactcagcttcccagatgagaagcctgttgttgtgctatcagcaatggcaaagaccaccaataagcttttgatggctggggagaaggctgtttgctgcggtgtcaccaacgtcgacactatcgaagagttgagctatataaaggaactccatataaggactgctcatgagcttggagtggaaacagcagttattgcagaacatctagaaggactggaacagcttcttaaaggcgtcgcaatgatgaaggaattaactttacgctcaagagactacttggtttcatttggagaatgcatgtccactaggctatttgctgcgtacctgaacaaaattgggcacaaagcacgacagtatgatgcatttgagatcgggattatcaccacagatgacttcactaatgctgatattcttgaggcaacatacccggcggtttcgaaaaagttacttggtgactggagcaaggaaaatgcactccccgttgtcacaggcttccttggaaagggatggagatcttgtgctgtaactacgcttggtagaggaggtagcgatttgactgcaacaacgatcgggaaggctttaggtttgcgggagatccaggtttggaaagatgtggatggagttttgacttgtgatcctaacatttactgcggagctcaacctgttccacacttgacatttgatgaggctgctgaacttgcttactttggtgcccaggtgttgcatccactttccatgcgcccagcgcgagaaggtaacattcctgtaagggttaagaactcttacaatcccactgctccaggaactgtcatcaccagatcaagagacatgagcaaggctgtattgaccagcatcgttctgaaacgtaatgtcaccatgttggacatcactagcacccgtatgctcggccaatatggtttccttgccaaggtgttttccacatttgaaaagttgggcatatctgtggatgttgttgcaaccagcgaagttagcatttctttgacattggatccttcaaagttctgtagcagagagttaattcaacacgagcttgatcaggtggtggaggaacttgagaagattgctgttgtaaatctgcttcgacacagatcaattatctctctcatcggaaatgttcagagatcatcattcatattagagaagggcttccgagtacttcgaaccaatgggattaatgtccagatgatctcccaaggtgcatctaaggtaaacatctcactgatagtgaatgatgatgaggcggagcattgtgtgaaggctctccactcggccttctttgagacagacacttgtgaagcagtctcagaatgcccgaccggctacatcgctgcctcttcgtgaaacctctaggtgcaacctgcaaggtctgaaagtactagctagtttgatgttatgattcttgtcagactggtattaggaaacaaagctcccattctccttgtgtaatataatgtaatttgattgggagatgtactggaaaatcaataagttttcctatttgaatatatgattaggactgcctacaacatcagtt

SEQ ID NO: 94 - DNA, 3043 bp, Arabidopsis thaliana
  source 1..3043: mol_type = genomic DNA
atgagatctcttctctttgtactatcactcatttgcttttgctctcaaacagcactttcatggaagaaggaagagtttcgcagctgtgaccaaactccattttgtaaacgcgctcgatctcgtactcccggcgcgtgttctctaattgtcggcgatgtttccatcactgatggagatctcgtagcgaagcttctaccgaaagcgcctaatcaaggcgatggggatcagatcaagccgttgattctttctctctcagtttacaaggatgggatcgtgcggcttaaaatcgatgaggaccattcgttgaacccgccgaagaagaggttccaagttcctgatgtggtagtgtctgagtttgaggagaagaagatctggctgcagaaagtagcgacggagacgatctctggagacactagtccgtcttcagtagtttatgtatccgatggttacgaggcggtggtgcgacacgatccgtttgaggtgtatgtgcgtgagaaatcaggtgatcgccgtcgcgttgtgtcattgaattctcatggattatttgattttgagcagttggggaggaaaactgaaggagataactgggaagagaaatttaggactcatacagattctagaccatctggtcctcaatctattagtttcgatgtttcgttttatgattccagtttcgtttatggaattcctgaacacgccactagcttcgcgttgaagcctaccaagggtcctggagttgaggaatctgaaccctacaggctttttaatctagatgtgtttgaatacgatcatgaatcaccgtttgggctttacgggtcgattccgttcatggtttcgcatgggaagtctggtaaaacttcaggatttttctggttgaatgctgcggaaatgcagattgatgtgttggctaatggttgggatgcagagagtggtatttctttgccttctagtcacagtaggatcgacacattctggatgagcgaggcagggattgtggatacattctttttcgttgggcctgagccaaaggatgttgtaaagcagtatgcaagtgtgacaggtacttcagccatgcctcagttgtttgccactggttatcatcaatgtaggtggaactacaaagatgaggaggatgtggcacaggtggactcgaaattcgatgaacacgatattccttatgatgttctctggcttgacattgagcatacagatgggaagagatactttacatgggatagtgtgttgtttcctcatccagaggagatgcaaaagaaattggctgcaaagggtaggaagatggtgaccattgtggatcctcatatcaagagggatgactcatacttcttacacaaagaggctactcagatgggatactatgttaaggattcatctggaaaagactttgatggttggtgctggcctggttcatcatcttacattgatatgttgagcccagagattagaaaatggtggggtgggaggttctcgtataagaactatgttggttcaactccatcattgtacacctggaatgacatgaatgagccttctgtattcaatggtcccgaggttactatgccaagagatgcattacatgttgggggtgttgaacacagagaagttcataacgcatatggatattacttccacatggcgacttccgatggacttgttatgcgtgaagaaggaaaggataggccttttgtattgtcaagagcaatctttcccggcactcaaagatacggagcaatttggactggagataacacagccgaatgggaacaccttagagtctccattccaatgatattgacacttggtcttactggaattacattctctggagctgatattggtgggttttttggaaatcctgaaccagaacttctagttaggtggtaccaagtgggtgcttactatccatttttcaggggtcatgctcatcacgataccaaaagacgagagccttggttgtttggtgaacggaacacagaactcatgagagatgccatacacactcgttacacactgctcccatacttctacacgttgttcagagaagcaaacgttacgggtgttcctgttgtacgcccattatggatggaattcccgcaagatgaagctacttttagcaacgatgaagccttcatggtcggtagtggtctactggttcaaggagtttacaccaagggaacaacgcaagcttccgtgtatttgcctggcaaagaatcatggtatgacttgagaaacggtaagacttacgttggaggcaagactcacaagatggatgctccagaggagagtattcctgcgtttcaaaaggcaggaaccatcatcccaaggaaggaccggtttaggcgaagttcctctcaaatggacaatgatccttatactttggtggtagctttgaacagttctcaagaagcagaaggtgaactctacatcgatgacggcaaaagctttgaattcagacgaggctcttacatccatcgtcgcttcgtcttctcaaagggtgttcttacatcaacgaacttagctcctccagaagctcgtctctcttcccaatgcttgatcgacagaattatcctcttgggacacagctcaggtccaaaatctgcgttggtggaaccgttgaatcaaaaggcagagattgagatgggacctctgcgaatgggtgggcttgtagcttcctcgggtacaaaggtgttgactatccgcaaaccgggtgttcgagtggaccaagactggaccgtaaagattctgtgattgaacggtttgaaccagtttcactcatggccgttagagtggccgaaatctgcttttccggcgacggaatatcacactttttaatatatgtttggagatttagacttaaatagttgtaagagctaacagtttgaaagtcactttgcattgttgtttatcttcatataaatgagtttagattttgataatttcagaattcgtggaatcataattaacaattttgatagggaaaaataatttgttttttttagtcagagggtcaaataatcttaccttc

SEQ ID NO: 95 - DNA, 787 bp, Arabidopsis thaliana
  source 1..787: mol_type = genomic DNA
attttttctagggtttcctcttccgcattcgtcgtcttcagctcctcctacacagtttcttctctgaatctacttaggaagctaaaatgggtagatgtccgactagaaaagtgaagaagaggagattatctcacaaaacagctcgccgtgacaaattcgaagtcaaaggcgatgacttggtttacacagagttgcgtaaaccggagacggagattaagccgttacagcttgacgaggatttgcctggaatgggtcaattctactgcttacactgcgatcgatacttctccaacgtatcagtgagggatgatcatttcaagactaagaaacacaagaagcgtgtgaatatgatgatgggacaagcgccacactcgcaactcgatgcagatttagccgggggaatggggatgccggacaatggcccaaagctgatgtctaatttggtattcacagagttgcgtaaaccagagacggaggatttacctggaatgggtcaattcaactgcttactctgccatcggaacttctccaatgcatcagtgatggattatcatttcaagactaagaaacacaaaaagcgtgtgaagaagatagagcgaccagcgccacactcgcaactcgatgcagatttagctggtggaatgggaatgccagacaatggtccaaagctgatgtctgcctgagtttttacagttattttccttatttagttaatggaacccgaaattttgttgtaaaactataatctcctaaattaatgatacaggttttttgtctgttgccaagt

SEQ ID NO: 96 - DNA, 1397 bp, Arabidopsis thaliana
  source 1..1397: mol_type = genomic DNA
aaaataatggcttcgcccgggttcgaaccggagaccttcagtgtgttagactgacgtgataaccaactacaccacgaaacctacatgcttctttctaacctcaacaatatatatatacatatagataactgtttaatattgtaacttgtaaccagtgtcggctaatttcgacttttgtagatctttttctgctctttctctctctctctctctctctctctctctctctctctctcttgtattatttctatctcccccgccgtcgaaagagaaacgtcgatcggagaacctttgaaatgtcgactggattagatatgtctctcgacgacatgatcgccaagaaccgtaagtctcgtggtggagccggccccgctcgtggaaccggatccggatccggaccgggtccgactcgccgcaacaaccctaatcggaaatcaacccgatctgctccataccaatcagccaaggcgccggagtccacctggggtcacgacatgttctccgatagatctgaagatcaccgatcgggacgttcctccgccggaatcgaaactggaaccaagctctacatttccaatttggattacggtgtcatgaacgaagacatcaaggaactgtttgctgaagttggagaacttaaacgctacacagttcattttgatagaagtggaagatcaaagggaactgctgaagtagtgtattctcggcgtggcgatgcactcgcagctgtgaagaagtataatgatgttcagctggatggaaaacccatgaagatagagattgtgggcactaatcttcaaactgctgcagccccgtctggtagacctgcgaatggaaactccaatggtgctccatggagcagaggaggacaagggagaggaggtcaacaacgaggtggtggacgaggaggcggtggccgaggtggtggtggtcgtggtaggcgtcctggtaagggccctgcagagaagatttctgcggaagatcttgatgcggatcttgataagtaccattctggagatatggagacaaactaaggaacgtgactgatcttctcaaaccggtaggggttttaggaggaagagaatcgagaaaatgtttgccagaggctttaccacttagcgcctttttggctgtgttgttcatttgtttcattagaatgactttacagaattgagaatatgtgttatttaaagttgttgtctatcttaataccctcaagtgaaaggcagaggaaggaataccaatttcgtttacagatcatatgcaggcaaaagagttttcagaaatcaggtttagttacttgtattgtgtctcttatccaagccatgccttgtggtattatgagcgcagaattttgattgaatattgttcatttgcattaaagtatcaaaccattt

SEQ ID NO: 97 - DNA, 636 bp, Arabidopsis thaliana
  source 1..636: mol_type = genomic DNA
aaaactcctccgtaaaaccctttcatttgcatttgggaatcgattgctcttcttcgtagtcgcctttgaattcgcagagtgagaagcaatgaaggtgagatcatctgtgaagaagatgtgtgagttttgtaaaacagtgaaacgtcgtggacgtgtgtatgttatatgctcttccaatcctaagcacaagcaaagacaagggttcagttcctttgcttatgaaggaattacaccttcccctttgtttgctgagccgattgctagtcaggagttggtgaggctgcctggtcagggggtatcagccggactggcatcacttttacacaaaaggcctatgccaacagcgtatttcggatggaggtctggtcttgcatccattctcttcaaacaaggaaattaggatgtcagcatttccctttttattcttcagatttgtaatcgcagttttcttccaattcctatgaaacattattgtatatctctccacttttactttggtcagtcgtatgctccttcgagacctgtttgattgtgcctcgcatgacctgaacaaagagatatattatgacactcgagtatttgtttttacattttccactggagcatatgttagggatcaatatgtttttcttttag

SEQ ID NO: 98 - DNA, 666 bp, Arabidopsis thaliana
  source 1..666: mol_type = genomic DNA
tgctcttcttcgtagtcgcctttgaattcgcagttagagatggatgcttcagattcgttttacttttgcttccatcatcggatcaactaaggattgcagtttttctgagtgagaagcaatgaaggtgagatcatctgtgaagaagatgtgtgagttttgtaaaacagtgaaacgtcgtggacgtgtgtatgttatatgctcttccaatcctaagcacaagcaaagacaagggttcagttcctttgcttatgaaggaattacaccttcccctttgtttgctgagccgattgctagtcaggagttggtgaggctgcctggtcagggggtatcagccggactggcatcacttttacacaaaaggcctatgccaacagcgtatttcggatggaggtctggtcttgcatccattctcttcaaacaaggaaattaggatgtcagcatttccctttttattcttcagatttgtaatcgcagttttcttccaattcctatgaaacattattgtatatctctccacttttactttggtcagtcgtatgctccttcgagacctgtttgattgtgcctcgcatgacctgaacaaagagatatattatgacactcgagtatttgtttttacattttccactggagcatatgttagggatcaatatgtttttcttttag

SEQ ID NO: 99 - DNA, 1991 bp, Arabidopsis thaliana
  source 1..1991: mol_type = genomic DNA
attccttgcttcatttttcgtcaccctagccgctttactctcttgcgatatctctgaggtaattctggagcagcataaacaatcaattgattcattcttcttgataccaagttgtggaaactctaggattgtttgctgtatatctccagaattgctgttttgattgaatttaggtcgcttagctcagttgatagagcaccacattttttgtggtagaaatcgatttgtttgacagtctctaaccatgggtaaagagaagtttcacatcaacattgtggtcattggccacgtcgattctggaaagtcgaccaccactggacacttgatctacaagttgggtggtattgacaagcgtgtcattgagaggttcgagaaggaggctgctgagatgaacaagaggtccttcaagtacgcatgggttttggacaaacttaaggctgagcgtgagcgtggtatcaccattgacattgctctctggaagttcgagaccaccaagtactactgcactgtcattgatgctcctggccatcgtgatttcatcaagaacatgatcactggtacctcccaggctgattgtgctgtccttatcattgactccaccactggtggttttgaggctggtatctccaaggatggtcagacccgtgagcacgctctacttgctttcacccttggtgtcaagcagatgatctgctgttgtaacaagatggatgccactacccccaagtactccaaggccaggtacgatgaaatcatcaaggaggtgtcttcctacttgaagaaggttggttacaaccccgacaaaatcccatttgtgcccatctctggatttgagggtgacaacatgattgagaggtccaccaaccttgactggtacaagggaccaactctccttgaggctcttgaccagatcaacgagcccaagaggccgtcagacaagccccttcgtctcccacttcaggatgtctacaagattggtggtattggaacggtgccagtgggacgtgttgagactggtatgatcaagcctggtatggttgtgacctttgctcccacaggattgaccactgaggtcaagtctgttgagatgcaccacgagtctcttcttgaggcacttccaggtgacaacgttgggttcaatgttaagaatgttgctgtcaaggatcttaagagagggtacgtcgcatccaactccaaggatgaccctgccaagggtgctgctaacttcacctcccaggtcatcatcatgaaccaccctggtcagattggtaacggttacgccccagtcctggattgccacacctctcacattgcagtcaagttctctgagatcttgaccaagattgacaggcgttctggtaaggagattgagaaggagcctaaattcttgaagaatggtgatgctggtatggtgaagatgactccaaccaagcccatggttgtggagaccttctctgagtacccaccacttggacgtttcgctgtgagggacatgaggcagactgttgcagtcggtgttatcaagagtgttgacaagaaggacccaactggagccaaggttaccaaggctgcagtcaagaagggtgccaagtgaactctgaacatcaaaactctttccgctgatgaaatgaaggactattttagtttctttactttagtagtttggtatttggttggttgtttgtgttaccgcttcgtttattctccgtcggagctcaattctcggaattgggttcttgatcggaggtggcggaggtacttggcactcgagcttcctgtttatttcttttgttttgtgttatgattttgaacctttttggatattcggttatatgatatttgtgtcattcctgcggatattatcttatcttatcaacttaagtctgtttttcttctctaaaattcaacgatcagcctctgaagtttcttacatggtaaaattgtaatctagaactttaaacaacattggagaaacaagtctatatcagttt

SEQ ID NO: 100 - DNA, 1408 bp, Arabidopsis thaliana
  source 1..1408: mol_type = genomic DNA
tcatgatccttaatcttagctcctagggtttctgtgaattagtctaattttacaattttatgcctttgaggatatatcttaatgtgaaagttttaaacttgtaactcaaaaaccatttgttagttagtaatcatcatcattctgaattgagctttgtttgaatttgagtagggcaacgaaagattcaagttagttgcggtggtaagagtgaggtgttgaagagtgatacaatggaacctcatgaagcagaaacgtttgtgaacaagagaaccctttatgctcccattgagccatatagcagtggaaatttaaaggtttcagatgttcacactctctactgggagcaatcaggcaaacccgatggacacccggttgtttttcttcacggcgggccgggaggagggacggctcctagtaataggagattcttcgatccggagttttatcggattgttctgtttgatcagagaggtgcggggaagagtacaccgcatgcttgtttggaggaaaacaccacatgggaccttgtgaatgatattgaaaaactaagagaacatttgaaaatacctgaatggctggtttttggaggatcatggggaagcactctagctcttgcatacagtcagtctcaccctgacaaggttactggtttggtccttagagggatctttttgttgcgtaaaaaggagattgactggttttacgagggcggtgctgctgctatttaccctgatgcttgggaggagttcagagatcttattccagaaaacgagagaggtagtagccttgtggacgcgtatcacaaaagattgaattctgatgatctggaaattcaatacgcagctgcaagagcttggactaaatgggaaatgatgactgcttatcttcgtccaaatcttgaaaacgttcaaaaggcagaggatgataaattttcattggcgtttgcaaggattgaaaatcactactttgttaacaaaggtttcttcccgtcggactcacacttgctagacaatgttgataaaatacgacatatcaagaccaccattgttcagggaaggtatgacgtatgctgtcctatgatgtctgcttgggatctgcacaaagcatggccagaggcagaactcaagattgtttatgatgctgggcactcggcaaatgagccaggaatatcagcggaactcgtggttgccaatgaaaagatgaaagcacttatgggatgaagtatttgatggaatgaaagctgctcattttgttcatttctttgggacctttgttcatattttcaagtttgttgctgcaaagtaaatatcacattcagagttagttgttaacgcgaaaccgaatgttatttccatggacgtttatacccaaatgaaaaagacaatgacataggtgcagtgttttgaaa

SEQ ID NO: 101 - DNA, 1213 bp, Arabidopsis thaliana
  source 1..1213: mol_type = genomic DNA
acagagttcagaatatcgacggcgacaatttctctctccggctaacttttttctagagaaagctatggcggacgaagaagatgagttactggagacagaactaagttacgaccagaaaaaggaaatcgccaagtggtttttcctcaacgctcccgctggagaaatcaattacgtcgctaaagatttaaaggcggttttgagcgatgaggaagtgtacaatgaagcagccatggaagcatttccagtgtacaacaaaactcacatgatttgccttgaaatgcccagtggagctggtgatgtgattgtctcatcttacagtgaaattaatgaaaatgagtaccttgatccaagaactgcccaggttgccatagttgatcatgttaaacagatttgtacaaaggtacggcctgcaaatgatgaagaacttccttctttgtatattgaggagtacagatatgctcttgatgctgaaatccagagatatgttagtgaatcttatccgaaaggtatgtctgcagttaattgtgtgaaagggaaagataatgagggtccagggtccgactttgagcttgttgttataattactgctatgagacttagtccccagaacttctgtaatggaagttggagatctgtatggaacatagatttccaggatgaatcccaggtgcttgacataaaagggaaattgcaggtaggagctcattattttgaagagggaaatgtggaattagatgcaaaaaaagatttccaagattcaacaatatttcagtctgcagatgactgcgcgattgccatagccaatattatcaggcaccatgaaacagagtaccttgcatctctagaggtagcttattcaaaattaccggataacactttcaaggatttgaggaggaaacttccggtgacacgaactctgttcccatggcagaacactttacagttcagcctaacaagagaggtcgagaaagaacttggacttggcaagataagtattatttctgttgtgtcttgtctttcctttggagtaatgtatacaaatcgcattagtaagtatgatagatattgttccgcaagccgcatgaaagaattgaagtttggtcccaaaaagagctccgttgccgggaatcgaacccgggtctcctgggtgaaagccagatatcctaaccgctggacgacaacggatatgttattggaactgttaaagaactaa

SEQ ID NO: 102 - DNA, 2160 bp, Arabidopsis thaliana
  source 1..2160: mol_type = genomic DNA
ctcgtctccttctccacttggatctcaaaagtccgatccaaaaccaaatccgccataactctctctctctctcccacttcccacagagagacacattcatgccagcaatgccaggtctcgtctcagtcaaaactccttccgatacaccgccgctacgtgtagccgtaccagacacgcaacctctctcaaacccgccgcgaactccgatgaagaaaaccccttcctctacaccatctcgatccaaaccatcaccaaatagatccaccggcaaaaaagattccccaaccgtatcctcctccaccgcagccgtaatcgacgtcgacgatccatctctagataatccagatctcggtcctttccttctaaaattagctcgtgacgctattgcttctggtgaaggtcctaacaaagcattagattacgcgatccgagcaactaagtcctttgagagatgttgcgccgccgttgctccgcctattcccggtggtagcgatggtggacctgttcttgatctcgctatgagccttcatgttctcgctgctatttactgtagtctcggccgatttgatgaagctgtaccacctcttgaacgagctattcaagtccctgatccgactcgtggccctgaccactctctcgctgcgttttctggtcatatgcaacttggtgatacgttgtctatgcttggtcagattgatagatctattgcttgttatgaagaaggtcttaagatccagatccagactttgggtgatactgatccacgagttggtgaaacttgcaggtacttagcagaagcatatgttcaagcaatgcagttcaataaagcggaagagttatgcaagaagactctagagattcaccgagcgcatagtgaacctgcttcactggaggaagcagctgataggagattgatggcaattatctgcgaggctaaaggagattatgaaaacgctcttgagcatcttgttcttgctagtatggctatgattgcgagtggacaagaatctgaggttgcatcgattgatgttagtattgggaatatttacatgtcgctgtgccggtttgatgaagctgtgttttcatatcagaaggctcttactgtgtttaaggcttctaaaggagagactcatccgacggttgcgtcagtgtttgttagattggctgagctttaccatagaacagggaaacttcgtgagtctaagtcttactgtgagaatgcgttgaggatatacaataagccggtgcctgggacaactgtggaggagattgctggtggattaactgagatttctgctatttatgagtctgtagatgaacctgaggaagcattgaagctacttcagaagtctatgaaattgcttgaggataagccaggacagcagagcgccattgcagggttagaggcacggatgggagttatgtattacacagtggggaggtacgaggacgcaagaaacgcgtttgagagcgctgtgacaaagctacgggcagcaggtgagaaatctgccttcttcggtgttgtattaaaccagatgggactagcctgcgttcagcttttcaagattgatgaagcgggtgagctgtttgaagaagcaagaggtattcttgaacaagaacgtggaccgtgcgatcaggacactctcggtgtttatagcaatctagctgctacctatgacgctatgggaaggatagaggatgcgattgagatattagagcaggttctgaagctgagagaggaaaagctcgggactgcgaatccggattttgaagacgagaagaaacgtttggccgagcttttgaaggaagctgggcggtcgcggaactacaaagccaagtcgctccagaatctgattgatccaaatgcaagacctccgaagaaagagtcttctgctaagaaatggcccagcctcggtttcaagttctgaggaaaaaattatcatataaaataaatcatccacatatatattcaatattttattttattgttattgttatattttttatctgatctattttctgtatcataatctgaggttgatgaattaatttcatgtatagtgtttttatttgagtttggtgaaatactgccaagatggtgagctgtttgtttgagtttgaaatttctttaattcaatcacttttttcttcttctgataa

SEQ ID NO: 103 - DNA, 2248 bp, Arabidopsis thaliana
  source 1..2248: mol_type = genomic DNA
ctcgtctccttctccacttggatctcaaaagtccgatccaaaaccaaatccgccataactctctctctctctcccacttcccacagagagacacattcatgccagcaatgccaggtctcgtctcagtcaaaactccttccgatacaccgccgctacgtgtagccgtaccagacacgcaacctctctcaaacccgccgcgaactccgatgaagaaaaccccttcctctacaccatctcgatccaaaccatcaccaaatagatccaccggcaaaaaagattccccaaccgtatcctcctccaccgcagccgtaatcgacgtcgacgatccatctctagataatccagatctcggtcctttccttctaaaattagctcgtgacgctattgcttctggtgaaggtcctaacaaagcattagattacgcgatccgagcaactaagtcctttgagagatgttgcgccgccgttgctccgcctattcccggtggtagcgatggtggacctgttcttgatctcgctatgagccttcatgttctcgctgctatttactgtagtctcggccgatttgatgaagctgtaccacctcttgaacgagctattcaagtccctgatccgactcgtggccctgaccactctctcgctgcgttttctggtcatatgcaacttggtgatacgttgtctatgcttggtcagattgatagatctattgcttgttatgaagaaggtcttaagatccagatccagactttgggtgatactgatccacgagttggtgaaacttgcaggtacttagcagaagcatatgttcaagcaatgcagttcaataaagcggaagagttatgcaagaagactctagagattcaccgagcgcatagtgaacctgcttcactggaggaagcagctgataggagattgatggcaattatctgcgaggctaaaggagattatgaaaacgctcttgagcatcttgttcttgctagtatggctatgattgcgagtggacaagaatctgaggttgcatcgattgatgttagtattgggaatatttacatgtcgctgtgccggtttgatgaagctgtgttttcatatcagaaggctcttactgtgtttaaggcttctaaaggagagactcatccgacggttgcgtcagtgtttgttagattggctgagctttaccatagaacagggaaacttcgtgagtctaagtcttactgtgagaatgcgttgaggatatacaataagccggtgcctgggacaactgtggaggagattgctggtggattaactgagatttctgctatttatgagtctgtagatgaacctgaggaagcattgaagctacttcagaagtctatgaaattgcttgaggataagccaggacagcagagcgccattgcagggttagaggcacggatgggagttatgtattacacagtggggaggtacgaggacgcaagaaacgcgtttgagagcgctgtgacaaagctacgggcagcaggtgagaaatctgccttcttcggtgttgtattaaaccagatgggactagcctgcgttcagcttttcaagattgatgaagcgggtgagctgtttgaagaagcaagaggtattcttgaacaagaacgtggaccgtgcgatcaggacactctcggtgtttatagcaatctagctgctacctatgacgctatgggaaggtaaagtcctaaagaaaactatctgactatgtaattagatcagacatccttaatgaaacattaaagtctttcttcgtgatggctatgtaatttgcaggatagaggatgcgattgagatattagagcaggttctgaagctgagagaggaaaagctcgggactgcgaatccggattttgaagacgagaagaaacgtttggccgagcttttgaaggaagctgggcggtcgcggaactacaaagccaagtcgctccagaatctgattgatccaaatgcaagacctccgaagaaagagtcttctgctaagaaatggcccagcctcggtttcaagttctgaggaaaaaattatcatataaaataaatcatccacatatatattcaatattttattttattgttattgttatattttttatctgatctattttctgtatcataatctgaggttgatgaattaatttcatgtatagtgtttttatttgagtttggtgaaatactgccaagatggtgagctgtttgtttgagtttgaaatttctttaattcaatcacttttttcttc

SEQ ID NO: 104 - DNA, 1337 bp, Arabidopsis thaliana
  source 1..1337: mol_type = genomic DNA
ttaaagtaatgacttttttttatatgatatattctcaattttgttactcggaaacaatagaaaggataacgaatcgtttctcttcgatcgaaagaatatatatttggaagttttctctgcttttttgttttcgtttgatagaatgggaacagttctcgattcgcattttctggctctcactgctattgtcactgtgatttaccagttcatattcttcgtaatcacggctcttttcaaatttgatcaagtcactgactttgctggtagcacaaacttcgttatacttgctgtgttaacacttgttctcaaagcctcttggcattttcgacagatagtattgactttgctagttgtggtatggggtcttcgcttggggattttccttctaatgaggatcttgcaatggggggaagatcgtcgctttgatgaacagcgtggaaatatagtgagactaatcattttctggactcttcaggctgtgtgggtttggacggttagcttacctttaacacttgttaatgcaagtgatggtggtggatctcttaaacccgcagatgttatcggttggactatgtgggttttcggtttcttgattgaagctgcagctgatcaacagaagctatcattcaaaaactctcctgaaaacagaggaaaatggtgtgatgttggagtctggaagtattcaagacatccaaactacttcggtgagatgttactgtggtggggaatctttgtggctgcatcgcctgtgcttgaaggtgcagagtatcttgtcatattcggaccactctttctcactttgctacttctattcgtcagcggcataccattactcgaggcatcggctgacaaaaaacatggaaactcaggagcttacagatcctacaagaagacaacaagtcctctgattctgttcccaagaggagtgtatgggaacttaccaggatggttcaagacggtctttctcttcgagtttccattttacagccgaaatctccctcaagagggtagactccaaaacagcaaagagaaagaagtaaaagatgactgatttgtgatactcatatttgagttattgttcttcacaacactctttgataaaatttgtgtaaaaaattgcccgtaagaaactgaatttgtttgaaatattggacagtcttgacagattatctcagttgtatttggttcttttttttatgtgattttgttttttggttaaaaaaagttcccattccaagaatcgaacccgggtctcctgggtgaaagccaaatatcctaaccgctggacgacatcggatttgattatttgattatttaattactttatatgttgattt

SEQ ID NO: 105 - DNA, 1079 bp, Arabidopsis thaliana
  source 1..1079: mol_type = genomic DNA
gaagagtaagagtaaaaaacaaaaccttcgtctctaacaaatgtgtggcagctgattgaaactagtagtggtgaaggagaaggagaatgggagatctctacgctttggacttcgatggagttctctgtgatagttgtggagaaagctctctatctgctgttaaggcagccaaagtgagatggcctgatttgttcgaaggagttgattccgctttagaggaatggatcgtcgatcaaatgcatattgtgagacctgtggttgaaactggctatgaaaatcttctacttgtgcggctgttattggagaccaagataccgtctattcgaaaatcttcagttgcagaggggttgacggttgatgggatactggagagctgggcaaagtttaagcccgtgatcatggaagcttgggatgaagatagagatgctttggtagatttgtttggaaaagttagagatgattggattaacaaggacttgacaacttggattggtgccaatagattctacccaggagtttcagatgcactgaaatttgccagctcaaagatttatatcgttaccacgaaacagggccgctttgcagaagcgttactgcgtgaaatagcaggtgtaatcataccatcagaaaggatttatggtttgggttcagggccaaaggtggaagttctaaagctacttcaagataaaccagaacatcagggcttgacgctgcatttcgtggaagacagactcgcaacgctgaaaaatgtcataaaagagcctgaattagacaaatggagtttatacctaggaacctggggatacaacactgagaaagagagagctgaagcagcaggcattcccaggattcaggttattgagctctccacgtttagcaataagcttaaatgagtgcatatactcattggaaaagaaacaaagctttcctctttattgtattctacggcattcaacggaaactaaaaaccaaacatgtttaggtaagattcagtaaaagagttgaactttcagtactacccattatagaagcttttctgtgacctataattcatccttagtaagatcattcttgttacc

SEQ ID NO: 106 - DNA, 1064 bp, Arabidopsis thaliana
  source 1..1064: mol_type = genomic DNA
gaagagtaagagtaaaaaacaaaaccttcgtctctaacaaatgtgtggcagctgattgaaactagtagtggtgaaggagaaggagaatgggagatctctacgctttggacttcgatggagttctctgtgatagttgtggagaaagctctctatctgctgttaaggcagccaaagtgagatggcctgatttgttcgaaggagttgattccgctttagaggaatggatcgtcgatcaaatgcatattgtgagacctgtggttgaaactggctatgaaaatcttctacttgtgcggctgttattggagaccaagataccgtctattcgaaaatcttcagttgcagaggggttgacggttgatgggatactggagagctgggcaaagtttaagcccgtgatcatggaagcttgggatgaagatagagatgctttggtagatttgtttggaaaagttagagatgattggattaacaaggacttgacaacttggattggtgccaatagattctacccaggagtttcagatgcactgaaatttgccagctcaaagatttatatcgttaccacgaaacagggccgctttgcagaagcgttactgcgtgaaatagcaggtgtaatcataccatcagaaaggatttatggtttgggttcagggccaaaggtggaagttctaaagctacttcaagataaaccagaacatcagggcttgacgctgcaactcgcaacgctgaaaaatgtcataaaagagcctgaattagacaaatggagtttatacctaggaacctggggatacaacactgagaaagagagagctgaagcagcaggcattcccaggattcaggttattgagctctccacgtttagcaataagcttaaatgagtgcatatactcattggaaaagaaacaaagctttcctctttattgtattctacggcattcaacggaaactaaaaaccaaacatgtttaggtaagattcagtaaaagagttgaactttcagtactacccattatagaagcttttctgtgacctataattcatccttagtaagatcattcttgttacc

SEQ ID NO: 107 - DNA, 1133 bp, Arabidopsis thaliana
  source 1..1133: mol_type = genomic DNA
gcagctgattgaaactagtagtggtgaaggagaaggagaatgggagatctctacgctttggacttcgatggagttctctgtgatagttgtggagaaagctctctatctgctgttaaggcagccaaagtgagatggcctgatttgttcgaaggagttgattccgctttagaggaatggatcgtcgatcaaatgcatattgtgagacctgtggttgaaactggctatgaaaatcttctacttgtgcggctgttattggagaccaagataccgtctattcgaaaatcttcagttgcagaggggttgacggttgatgggatactggagagctgggcaaagtttaagcccgtgatcatggaagcttgggatgaagatagagatgctttggtagatttgtttggaaaagttagagatgattggattaacaaggacttgacaacttggattggtgccaatagattctacccaggagtttcagatgcactgaaatttgccagctcaaagatttatatcgttaccacgaaacagggccgctttgcagaagcgttactgcgtgaaatagcaggtgtaatcataccatcagaaaggatttatggtttgggttcagggccaaaggtggaagttctaaagctacttcaagataaaccagaacatcagggcttgacgctgcagtaactcacgttctatatatctatcaataattcttctatctgcatgacttggtaatggtcaccattagtttacaatccctatgcatttttaatttggccagtttcgtggaagacagactcgcaacgctgaaaaatgtcataaaagagcctgaattagacaaatggagtttatacctaggaacctggggatacaacactgagaaagagagagctgaagcagcaggcattcccaggattcaggttattgagctctccacgtttagcaataagcttaaatgagtgcatatactcattggaaaagaaacaaagctttcctctttattgtattctacggcattcaacggaaactaaaaaccaaacatgtttaggtaagattcagtaaaagagttgaactttcagtactacccattatagaagcttttctgtgacctataattcatccttagtaagatcattcttgttacc

SEQ ID NO: 108 - DNA, 700 bp, Arabidopsis thaliana
  source 1..700: mol_type = genomic DNA
acatcttctcttttcttccccagcaaaaaatgagtctgcaaaatagaaaattcaagctgcgattgcgaggaagagaagagacttcagatctagcttgatccggtgataatggcgctcgagtgggtggttttaggttacgcggcggcggctgaagcgattatggtggtgctattgacgatgccaggactcgacggactccgcaagggattagtcgccgtcacgcgtaatctcctcaaaccgtttctctccatagttcctttctgtctcttcctcttaatggacatctactggaaatacgaaactatgccttcgtgcgatggcgattcctgcacaccgtcagagcatcttcgtcaccagaagtccatgatgaaatcccagcgaaacgcgcttctcattgcggctgcacttgtgttctactggatcctttactcagtcaccaatttggttgtcaagatcgagcatcttaaccagaggatcgagaggctcaggaacaaggattgatcgtctcgtctcaggttcaattagtgtaatgccttttttggttatctttcccatttggctaggttttctctttttcaacgtttctgatatgtgtcttttatcttgtggagattgaaggattttatcctacttttctatgtttggattcttatttgtaaccagattgtgattgtttcttgttgaattttgattgactcta

SEQ ID NO: 109 - DNA, 1754 bp, Arabidopsis thaliana
  source 1..1754: mol_type = genomic DNA
tctccacaaacaaacttgtactagaaaaatccctaaatctcaacaaaaccctaatttcaaggaagacgaagaaagaatgagttacagagtcgctaaagcatcgcagtatcttgcgatcaccggtggtgggatcacagacatcaagcttgcaaagaagtcttgggtgtttccatggcagtcttgcaccgtcttcgacgtttctccggtgaactacacgttcgaggttcaagctatgagttccgagaaacttccctttgttattcctgctgttttcacaatcggtcctcgcgttgatgatcctcacgctctcttgttgtatgccatgcttatgtctcaacacgataagcactcgaatcacgtcaatgagcttgttcagggtgttatcgaaggagagactcgtgttcttgttgcttccatgactatggaagaggtcttcaaaggaacaaaggagtttaagaaggaagtgtttgacaaggttcagctagagctaaaccagtttggtcttgtgatctacaacgccaatgtgaagcagcttgttgatgtgcctggacatgagtacttctcttacttgggccagaagactcagatggaagcagcaaaccaagccaagatcgatgtagcagaggcaaagatgaagggagaggttggtgccaaagaaaggactggactcacaatccagaatgcagccaagattgacgctgagtcaaagatcatctctactcaaaggctaggagaagggacaaaagaggagatcaaggtgaagactgaagtcaaagtgtttcagaatgagaaagaggctcttgttgctaaggctgatgcagcacttgcgattcaaaaggctgctttgtcccaaaactctcgtgtggctgaggttgaagcagccaaggctgttgctttgagggaagctgagcttcagactaaagtagagaagatgaatgcattgactcggacagagaagcttaaagctgagttcctcagtaaagccagtgttgagtatgaaactaaggtgcaagaagcgaactgggagttgtacaataagcaaaagcaagcagaagctgttctttacgagaagcagaagcaagcggaagcgacgaaagctgcagctgatgctgccttctattcaaaacagaaagatgcagagggacttgtcgcaatggccgatgctcaggggacttacctcaagaccctcttaggcgcagttaacaatgattactcagccatgagagacttcttgatgatcaacaatggcatttatcaggatattgccaagaccaatgctgttgcgatcagggacctgcagcctaagatcagcgtgtggaaccatggtggtgctgagcaggggatgaacggtggtggtaaagctacgatgaacgatattgctggactctacaagatgttaccaccggttcttgatacggtttatgagcagacagggatgcagccaccagcttggattggtacattgcgtggtgctgagcccaaacaatcacttcatgctcaacaacacagaggttgagatctcaaatgttgcttctttaattatacttttagctgttggggtttgttttctttttcttatgttatagaacttggaagttagagtttgaagttaaaacaatagtatctgacaaatgcgacttcgactagtgatttcgataaggatgtgtttttcctttttcaaatgtcagatttattattgcgtgttgaagatacctttcttctctcttgatacactaatataaataacatgttta

SEQ ID NO: 110 - DNA, 683 bp, Arabidopsis thaliana
  source 1..683: mol_type = genomic DNA
cacagaaccctccctctctagctctaaaaacatcccacaaactatctttcaacaacacaagacatatcacgaaacaaatcaaagcaaagatcatgaacacgattccagccgaactcactggatacttccactatctaccaccagataaatataataaccaaacaccaatcatggagtctgagtacttcaacatgccctcttctcctacttcttgttcctccttctaccacctcaatggtctgatcaacaacaacaactactcttcatcatccaatggtcaggatctaatgacgagcaacaactcaacttcagacgaagatcaccaacaaagtatggtcatcgatgagaggaaacaaaggagaatgatctctaacagggaatctgctcgtaggtcaagaatgagaaagcagagacatctcgatgagctttggtctcaagtgataagacttcgcactgataaccactgtcttatggataagctgaaccgcgtatctgaaagccatgagcttgctttaaaggagaacgctaagcttaaagaggaaacttctgatctcagacagctgatctctgagataaagtcacacaacgaagacgacaacagttttttaagagagctcgaagattcgatatcaaactctagatcggattcgaaccaaagcggcagagattttgagttgtgttaa

SEQ ID NO: 111 - DNA, 432 bp, Arabidopsis thaliana
  source 1..432: mol_type = genomic DNA
taagctagaggtttttagttctctgtgtggagtacggctgcattgtttctaccagtaatttgtgggatttccaagctccagtttttcgaatatggcggaagtaagtcttggtatgcttatagacattgtggacgaagagtggatgagggacactttgcctgatgatgatcttccattgcctccagtgcttgctgttaaaactgatgatactgaagaaaccaatcaggaaactcagcaagcagatgctgaaacttggcgtgatctagctcttgatacacagtaatagcctcttaagtacaatggaaaattcttacaagtcttgtttctcgttgtgtatgatcaaaaccaaaactgttcctggctttgtatttttttttggtagaagaggggggcgaacccccatttttattaaaactgaaaaactaaaaaaaa

SEQ ID NO: 112 - DNA, 3538 bp, Arabidopsis thaliana
  source 1..3538: mol_type = genomic DNA
gaagtagaagaagagaagtatctggagagagagaggcgtgcgatttccgcatcgaagaaacagtacggagttttatccgctccgattctgtggaagataatggggaaaggaggtgaagattgcgggaataagcaaactaatagttctgaattggtcaagtctgatacttttcctgcttggggtaaagatgtgtcggaatgcgaagagaagtttggtgttagtcgtgagaaaggtttgagcactgatgaggtgttgaaacggcatcagatctatggtttgaatgaattagagaagcctgagggtacttctatttttaagctgattttggaacagtttaatgatacattggttcgtattcttttggcggctgctgttatttcctttgtcttagccttctttgatggcgacgaaggtggtgagatgggtatcaccgcatttgttgagccgcttgttatttttctcatcttgattgttaatgccattgttggcatctggcaagaaactaatgctgagaaggcgttggaagctttgaaagagattcagtctcagcaagctaccgtcatgcgtgatgggactaaggtttccagtttgcctgcaaaggagcttgttcctggtgatattgtggaactgagggttggtgataaggtgcctgctgatatgcgtgtggttgctttgatcagttcaactttgagagtcgagcaggggtccttaacaggagagagtgaggcagtgagcaaaaccaccaagcacgtggatgagaatgctgatattcaaggaaagaaatgcatggtgtttgcaggaaccactgtcgtgaatgggaactgcatatgtttagttacagatactgggatgaatactgagattggaagggttcactcacagatccaggaagctgcacaacacgaggaagatacccctctgaagaaaaaacttaacgagtttggggaagttctgactatgatcattgggttaatttgtgcgttagtgtggctcatcaatgtcaaatactttctgtcatgggagtatgttgatggctggcccagaaactttaagttctccttcgagaagtgcacatattactttgagattgctgttgcactggcggttgctgcaattccagaaggtctgccagcagttattaccacatgtttggctcttggcactaggaagatggctcagaagaatgctctggttaggaagctacccagtgtggagactcttggatgcaccaccgtgatatgctctgacaaaactggaactcttacaaccaatcagatggctgtttcaaagctcgttgctatgggttcgaggatcggaactcttcgatctttcaatgttgaggggacctcgtttgatcctcgagatggaaagattgaagattggccaacgggtcggatggatgcaaatcttcagatgattgcaaaaattgctgccatttgcaacgatgctaatgttgagaaatctgatcagcaatttgtgtctaggggcatgcctactgaggcagctttgaaggttttggttgagaaaatgggatttcccgaaggattgaatgaagcttcatccgatggcaatgtcttacgttgttgtcggctatggagtgaactagaacaacggattgccacccttgagtttgaccgtgaccggaaatcaatgggagttatggtggattccagctcaggaaagaaactgctactggtcaagggtgccgtagaaaatgtattggaaaggagtacccatattcagctacttgatggttccactcgagagcttgaccaatactcaagggatcttattttacaaagcctacatgatatgtccttgagtgcattaagatgtctcggatttgcatactcagatgttccatcagattttgccacttatgatggcagtgaagaccatcctgctcatcagcaacttctcaacccatccaattattcatcaattgagtccaatctagtatttgttggatttgttggtttaagggatcctccaaggaaagaggtgcgtcaagccattgcagactgcagaacagcaggtattcgggtcatggttatcaccggagacaacaagagcacagcggaagcaatctgccgtgaaattggcgtatttgaagcagatgaagatatctcctcgagaagcttgacaggaaaagaatttatggatgttaaagatcagaagaatcatctaagacagacaggagggctcctgttctcaagggctgaaccaaaacacaaacaagagattgtcaggttactgaaagaagatggagaagtggttgccatgactggagatggagtcaatgatgctcctgccctgaagttggctgatattggtgtggctatgggcatttccgggacagaggtagcaaaggaggcatctgacttggtgttggcagatgataatttcagcaccattgttgcagctgttggtgaaggcaggtccatctataacaacatgaaggccttcatcaggtacatgatctcttccaacatcggtgaggttgcatcgatattcttgacagctgctcttggaatcccagaaggcatgatacccgttcaacttctgtgggtgaatctcgtaacagatggtcctccagctactgctttgggattcaacccccctgacaaggatattatgaaaaagcctcctcgtaggagcgatgactctcttatcactgcgtggatcctcttccgctatatggtgattggtttgtatgtgggagtagcaacggtgggagtattcatcatatggtacacacacaacagctttatgggcatagacctgagccaagacggtcacagccttgtgagctattcacagctcgcacattggggccaatgctcttcatgggaaggcttcaaagtgtctcctttcacagcaggctctcagactttctcgttcgactcaaacccttgcgactattttcagcagggtaaaatcaaggcatccacactctccctctcggtgttggtggccattgaaatgttcaactctctgaatgcactctcagaagatggcagcctggtgacgatgccaccctgggttaacccgtggctgctcctggcaatggctgtctcatttggactccactttgtgatattgtacgtcccattcttggctcaggtgtttggtattgtgccactgagcttgaacgagtggctgctagtgctggctgtgtcgctgccggtaattttgatagacgaagtgctcaagtttgtaggaaggtgcacgagtggctaccgctactcacctcgcactccctcagctaagcaaaaggaggagtaagaaaataattcaaaaggcattattattagactcttagttttagctgaaattaactttgttgctttactcatccttgctatatttaattctccaaacgataatttttggtttgaaaaagaaaagtttctaactttggttcatggacacagcccgtgatagaaagatgaatgtttcaaccaaaccttgattctttatgtaaacttttatggtcgaccaaattggtttttaagactgatggtaatttattttgggc

SEQ ID NO: 113 - DNA, 2087 bp, Arabidopsis thaliana
  source 1..2087: mol_type = genomic DNA
ataaacctacttcctttccttgcttcagctccccttttcttatccggaaaccaaaaacttccggtgataaaacctccttcgtcatctctctacttcttgctgaattttgtctgtctttgaagtggataaaatggcgtcaactttcactgccacatcttctattggttcaatggttgctccgaatggtcacaaatctgataagaaacttatcagcaagttgtcttcaagctcatttggaaggagacaaagtgtgtgtcctagacccagaagatccagttctgcaattgtgtgcgcagcaaaggaattacatttcaacaaagatgggactaccattaggagacttcaagctggtgtcaacaagctcgcagatcttgttggtgttacacttggacccaaaggacgaaatgttgttcttgagagcaagtatggatcaccacgaattgttaatgatggtgtgactgttgcaagagaggttgagttggaagacccggttgagaacattggcgctaagcttgtgaggcaagcggctgccaaaaccaatgacttggctggtgacggtacaacaacatctgttgttcttgcacaaggttttatcgctgagggtgtcaaggtggtagctgctggtgcaaaccctgttttgatcaccagaggtattgagaagacagcaaaggctttggttaccgagctcaagaaaatgtctaaggaggttgaagacagtgaacttgcagatgttgcagctgttagtgcgggtaacaacgacgaaattggaaatatgattgctgaagcaatgagcaaagtgggcaggaaaggtgtggtgacccttgaggagggtaaaagtgccgagaacaacctctacgtcgtagaaggaatgcaatttgaccgtggttatatctctccttactttgtgacagacagcgagaaaatgtccgtcgagttcgacaattgcaagttacttctcgttgacaagaaaattaccaatgcaagggatcttgttggtgttttggaggatgcaattagaggcggatacccaatattaattattgctgaagacattgaacaagaagctttagcgactcttgttgtaaacaagcttagaggtacactgaagatagcagctctcagagctccagggtttggagagcgcaagagccaataccttgatgatattgccattctaactggagcaactgtgatccgtgaggaagttggtctttcacttgacaaagctggaaaagaggttcttggtaatgcttcaaaggttgtcctcacaaaggagacctcgaccatagtgggtgatggaagcacacaggatgcagtgaaaaagcgtgttacacagattaaaaatcttattgagcaagcggagcaagattacgagaaggagaaactcaatgagagaattgcaaagctctctggtggagttgctgtgattcaggttggagcacaaactgagacagaactcaaagagaagaagttgagagttgaagatgctcttaatgcaacaaaggccgctgtcgaggaaggtattgttgttggtggtggttgcactctgcttcgtcttgcttccaaggttgatgccattaaagccacgcttgataatgatgaagaaaaggttggagcggatatagttaaaagagcactaagttaccccctaaaactaatcgccaagaatgctggtgttaatggaagtgtagttagcgagaaggtgctttccaacgataacgtgaaattcggttacaatgctgcaaccggcaagtacgaggatttgatggctgcaggaatcatcgatccaacaaaggttgtgagatgttgcttggaacacgcagcttcggttgcaaagactttcttgatgtcggactgcgttgttgttgagatcaaggaacctgaaccagttcccgtcggcaacccaatggacaactcaggatatggatactaagaggagataggctaatattgaaacggattactttagcttgcgagtgtaatgattttgaacaagagaatgtgtaatgtgaaactgaaattttgaattaatcatcatatgaataaatcatgattccctcaatgcttcgaaatatctcgaaatcgcc

SEQ ID NO: 114 - DNA, 2093 bp, Arabidopsis thaliana
  source 1..2093: mol_type = genomic DNA
ttaaaagcaccttccaagcgagagtaaggagataaacctacttcctttccttgcttcagctccccttttcttatccggaaaccaaaaacttccggtgataaaacctccttcgtcatctctctacttcttggataaaatggcgtcaactttcactgccacatcttctattggttcaatggttgctccgaatggtcacaaatctgataagaaacttatcagcaagttgtcttcaagctcatttggaaggagacaaagtgtgtgtcctagacccagaagatccagttctgcaattgtgtgcgcagcaaaggaattacatttcaacaaagatgggactaccattaggagacttcaagctggtgtcaacaagctcgcagatcttgttggtgttacacttggacccaaaggacgaaatgttgttcttgagagcaagtatggatcaccacgaattgttaatgatggtgtgactgttgcaagagaggttgagttggaagacccggttgagaacattggcgctaagcttgtgaggcaagcggctgccaaaaccaatgacttggctggtgacggtacaacaacatctgttgttcttgcacaaggttttatcgctgagggtgtcaaggtggtagctgctggtgcaaaccctgttttgatcaccagaggtattgagaagacagcaaaggctttggttaccgagctcaagaaaatgtctaaggaggttgaagacagtgaacttgcagatgttgcagctgttagtgcgggtaacaacgacgaaattggaaatatgattgctgaagcaatgagcaaagtgggcaggaaaggtgtggtgacccttgaggagggtaaaagtgccgagaacaacctctacgtcgtagaaggaatgcaatttgaccgtggttatatctctccttactttgtgacagacagcgagaaaatgtccgtcgagttcgacaattgcaagttacttctcgttgacaagaaaattaccaatgcaagggatcttgttggtgttttggaggatgcaattagaggcggatacccaatattaattattgctgaagacattgaacaagaagctttagcgactcttgttgtaaacaagcttagaggtacactgaagatagcagctctcagagctccagggtttggagagcgcaagagccaataccttgatgatattgccattctaactggagcaactgtgatccgtgaggaagttggtctttcacttgacaaagctggaaaagaggttcttggtaatgcttcaaaggttgtcctcacaaaggagacctcgaccatagtgggtgatggaagcacacaggatgcagtgaaaaagcgtgttacacagattaaaaatcttattgagcaagcggagcaagattacgagaaggagaaactcaatgagagaattgcaaagctctctggtggagttgctgtgattcaggttggagcacaaactgagacagaactcaaagagaagaagttgagagttgaagatgctcttaatgcaacaaaggccgctgtcgaggaaggtattgttgttggtggtggttgcactctgcttcgtcttgcttccaaggttgatgccattaaagccacgcttgataatgatgaagaaaaggttggagcggatatagttaaaagagcactaagttaccccctaaaactaatcgccaagaatgctggtgttaatggaagtgtagttagcgagaaggtgctttccaacgataacgtgaaattcggttacaatgctgcaaccggcaagtacgaggatttgatggctgcaggaatcatcgatccaacaaaggttgtgagatgttgcttggaacacgcagcttcggttgcaaagactttcttgatgtcggactgcgttgttgttgagatcaaggaacctgaaccagttcccgtcggcaacccaatggacaactcaggatatggatactaagaggagataggctaatattgaaacggattactttagcttgcgagtgtaatgattttgaacaagagaatgtgtaatgtgaaactgaaattttgaattaatcatcatatgaataaatcatgattccctcaatgcttcgaaatatctcgaaatcgcc

SEQ ID NO: 115 - DNA, 1960 bp, Arabidopsis thaliana
  source 1..1960: mol_type = genomic DNA
gtgaacgaagataaatttcgctattcctctctctctctctctctctctctctctctctctctctcttcttcttcttctccgttcgtgctctggactcgctcgaaatcgatccgatgataatttatgcagctcgaaacttaatttagaatcatacctttttctggatttggctgacgaatccgttttcaattgcacgagttgcttcgccaggtttatcaacttaagaatgtctaattatcaaggggatgatgctgagtacatggaagatgtggatgatgaaatggatgaggatgatttagatgaggattttcgtggggatgatatggctgcctctgattccgatgtcgatgagtttgactactctaataataaaatagctgacacttcagctgaccaagcccggaaagggaaagacatccaggggattccttgggacaggcttagtattacgagagagacatacagacaaactagactagaacagtataaaaattatgaaaatgtccctaactctggggaatcttcagggaaagattgcatggccacacagaaaggggctcttttttatgatttctggcggaatacaagatctatcaaatcaagtattcttcatttccagttgaggaatttggtttgggcaacttctaagcacgatgtctaccttatgtcacaatatttggtgagccactattctactttgacatccggaaagcatgatgttctcaatgttcaaggtcatgtttccccatctgagaaacatcctggaagtttgttggagggatttacaaagactcaagtgagtacactcgcagtgagagataaatttttagttgccggtggatttcaaggagaacttatatgcaagcatcttgatagacctggtgtgagcttttgttcacgtactacttatgatgataatgctataaccaatgctattgagatttataacaaacccagtggggcacttcattttactgcgtcgaataatgattgtggagtcagagattttgatatggagagataccagcttgttaaccagtttcgctttccatggccggtgaatcacacatctttaagtcctgatggtaaattgttgacgattgtgggagacaaccctgaaagccttctggtagaccccaacactggaaagacactggcaacgctatcaggacatctggacttttcctttgcatcagcatggcacccagatggattcacgttctccacaggtaaccaggacaagacctgccgggtttgggacattcgtaacctgtcaaaatctgttgctgtcttgaggggtaaccttggagcaatccgatccattcgctacacatctgatgggaagtacatggccatggctgagccggctgactttgtccatgtgtatgatgtctcaaacgggtatgaaacggagcaagagatcgacttctttggggagatctcgggaatatcatttagccccgacacagaagcactcttcataggcgtttgggaccgcacttacggaagtctaattgagtatagccggcgccacaactactcctaccttgattcatttctatgatcacccgacataccagaggaataaaagagccgatacatatgtgctgctgcactctcctgtcgctctgttaaactaagaaacccgagaaaagagaaaacataaactcaagtcgatctctaatggtgtaaatgatgtgttgtgcaagtactagtaggaatgttgtcacagagagcggatttagttagttaatgttcatttcttgtatgagtgttggagttcgtgtattgtacataagtatatgaggttcgggtgagtttgcatcaagtctcaactcttggcaaagagacaactttactcgagtctgtggctcgttatttggctatggtcacttgtagaggaactcaatttgagatgtttctgccgattgttggatcaaattatatatcatgatgtttc

SEQ ID NO: 116 - DNA, 2741 bp, Arabidopsis thaliana
  source 1..2741: mol_type = genomic DNA
aatcggcgcgtgatcgagaaagatcttctttaacctctttgcaacaaatctactcaaaaccctaacccctttttcaaattacttccatctttagatcgaatcaaatcaatgtccgtcgacgatctccctccgtcgtcggcctccgccgtaacgccactaggctcctccgtgattccgattgtgaacaagctccaagacatattcgctcagctaggaagtcaatcgacgatcgctcttccgcaagtagctgtcgtcggaagtcaaagcagtggcaaatccagcgttctagaagctctcgtcggccgtgactttcttcctcgtggcaatgatatttgcacgcgccgacctctccgtctccagcttgttcagacgaaacctagctctgatggtggatccgatgaagagtggggcgagtttcttcaccacgatcctgttagacgtatctacgatttctctgagattcgccgtgagattgaggcggagactaatagagtatcaggagagaacaaaggtgtatcagatattccgattggtttgaagatattttcacctaatgttttggatattagtcttgtggatcttcctggtatcactaaggttcctgttggtgatcagccaagtgatatcgaagcgcgtataagaacgatgatcttgacttacattaaggaacctagttgcttgatacttgctgttagccctgctaatactgatttagcaaattcagatgcattacaaatcgcaggaaatgctgatcctgatggtcatagaaccataggtgtaatcacaaagttggatattatggacagaggtactgatgctcggaatcaccttctgggaaaaacaattcctcttcgacttggatacgtgggagttgtaaatcgtagtcaagaggatattttgatgaaccgtagcatcaaggatgctcttgttgcagaggaaaagttctttcgtagtcgtccagtttacagcggtctcacagatcgtttgggtgtccctcaactggcaaagaaattaaatcaggtccttgttcaacacatcaaggcactgcttcctagtttaaagtcacgtatcaacaatgcattgtttgctacagcaaaggagtatgagagctatggggatataacagagtctaggggtggtcaaggagctcttctcctcagttttattacaaaatactgcgaagcatactcctctaccctggaagggaaaagtaaagaaatgtcaacatctgagctctcgggtggagcaagaattctctacattttccaatcagtatttgttaagagcttagaggaggttgatccatgtgaagacttaacagctgatgatattcggactgcaatacaaaatgcaactggtcccagatctgcattatttgttccagatgttccatttgaagttcttgtcaggaggcaaatatctcgtttattagatcccagccttcagtgcgctaggttcatcttcgatgagctagtaaagattagtcatcagtgtatgatgaaagagttacagcggtttccagtcctgcaaaagcgcatggatgaggttattgggaactttctgcgagaaggtcttgaaccttcgcaggcaatgatccgagatcttattgaaatggagatggattatataaacacctcacacccaaattttatcgggggaactaaagccgtggagcaagcaatgcaaacagtcaaatcttctaggattccgcatcctgttgcgcggccaagggatactgtggagcctgagaggacggcttcttccgggagtcaaataaaaacccgatcttttctcggccgacaagctaatggaatcatcactgatcaggcagttccaactgcagcagatgctgaaagacctgcaccagctggaagcacaagctggagtggtttctcatcaatttttcgggggagtgatggtcaggcagctgctaaaaacaacctattaaacaaaccattcagcgaaactactcaagaagtgtatcagaacttgtcaacaatctatttaaaggagcctccaactattttgaagtcatctgaaactcattcagaacaggagtcagttgagattgagataacaaagctattattgaaatcctactatgacattgtaaggaagaatgtcgaggacttggtcccaaaagcaatcatgcattttctggtaaattacacgaaacgtgagctgcacaatgttttcatcgagaagctttacagggagaacttaattgaagaactgttgaaagagcccgatgagttagcgataaagaggaaacgcacgcaagagactcttcgcattcttcagcaggctaatcggacgttagacgagctgccgttagaagctgaatcggtcgagagaggttacaaaattggttcagaagcgaaacatgaggagttaccgggcacaagaagatcaaggacagaaactaatgggaacggacggcttcatatgtaaattcaaattgtgattgcacgcatgactcattcatttggtgatggaaaagatttgttttcttccctttaaatcggttgtgcgtggggaaagaaaggtgttcttaggtatagtgaaacgtgatgataaacagaggttttgttgtgagggtattatcaacctactggaaaatgtgacttaatatttgtttctcaaaaccgagaagaataatcaattcctaattttacttttcatagctttatttgttacgaaaaacaagaacgtacatgagacaatgtaatgataaatttatc

SEQ ID NO: 117 - DNA, 2749 bp, Arabidopsis thaliana
  source 1..2749: mol_type = genomic DNA
gagaaagatcttctttaacctctttgcaacaaatctactcaaaaccctaacccctttttcaaattacttccatctttagatcgaatcaaatcaatgtccgtcgacgatctccctccgtcgtcggcctccgccgtaacgccactaggctcctccgtgattccgattgtgaacaagctccaagacatattcgctcagctaggaagtcaatcgacgatcgctcttccgcaagtagctgtcgtcggaagtcaaagcagtggcaaatccagcgttctagaagctctcgtcggccgtgactttcttcctcgtggcaatgatatttgcacgcgccgacctctccgtctccagcttgttcagacgaaacctagctctgatggtggatccgatgaagagtggggcgagtttcttcaccacgatcctgttagacgtatctacgatttctctgagattcgccgtgagattgaggcggagactaatagagtatcaggagagaacaaaggtgtatcagatattccgattggtttgaagatattttcacctaatgttttggatattagtcttgtggatcttcctggtatcactaaggttcctgttggtgatcagccaagtgatatcgaagcgcgtataagaacgatgatcttgacttacattaaggaacctagttgcttgatacttgctgttagccctgctaatactgatttagcaaattcagatgcattacaaatcgcaggaaatgctgatcctgatggtcatagaaccataggtgtaatcacaaagttggatattatggacagaggtactgatgctcggaatcaccttctgggaaaaacaattcctcttcgacttggatacgtgggagttgtaaatcgtagtcaagaggatattttgatgaaccgtagcatcaaggatgctcttgttgcagaggaaaagttctttcgtagtcgtccagtttacagcggtctcacagatcgtttgggtgtccctcaactggcaaagaaattaaatcaggtccttgttcaacacatcaaggcactgcttcctagtttaaagtcacgtatcaacaatgcattgtttgctacagcaaaggagtatgagagctatggggatataacagagtctaggggtggtcaaggagctcttctcctcagttttattacaaaatactgcgaagcatactcctctaccctggaagggaaaagtaaagaaatgtcaacatctgagctctcgggtggagcaagaattctctacattttccaatcagtatttgttaagagcttagaggaggttgatccatgtgaagacttaacagctgatgatattcggactgcaatacaaaatgcaactggtcccagatctgcattatttgttccagatgttccatttgaagttcttgtcaggaggcaaatatctcgtttattagatcccagccttcagtgcgctaggttcatcttcgatgagctagtaaagattagtcatcagtgtatgatgaaagagttacagcggtttccagtcctgcaaaagcgcatggatgaggttattgggaactttctgcgagaaggtcttgaaccttcgcaggcaatgatccgagatcttattgaaatggagatggattatataaacacctcacacccaaattttatcgggggaactaaagccgtggagcaagcaatgcaaacagtcaaatcttctaggattccgcatcctgttgcgcggccaagggatactgtggagcctgagaggacggcttcttccgggagtcaaataaaaacccgatcttttctcggccgacaagctaatggaatcatcactgatcaggcatttccaactgcagcagatgctgaaagacctgcaccagctggaagcacaagctggagtggtttctcatcaatttttcgggggagtgatggtcaggcagctgctaaaaacaacctattaaacaaaccattcagcgaaactactcaagaagtgtatcagaacttgtcaacaatctatttaaaggagcctccaactattttgaagtcatctgaaactcattcagaacaggagtcagttgagattgagataacaaagctattattgaaatcctactatgacattgtaaggaagaatgtcgaggacttggtcccaaaagcaatcatgcattttctggtaaattacacgaaacgtgagctgcacaatgttttcatcgagaagctttacagggagaacttaattgaagaactgttgaaagagcccgatgagttagcgataaagaggaaacgcacgcaagagactcttcgcattcttcagcaggctaatcggacgttagacgagctgccgttagaagctgaatcggtcgagagaggttacaaaattggttcagaagcgaaacatgaggagttaccgggcacaagaagatcaaggacagaaactaatgggaacggacggcttcatatgtaaattcaaattgtgattgcacgcatgactcattcatttggtgatggaaaagatttgttttcttccctttaaatcggttgtgcgtggggaaagaaaggtgttcttaggtatagtgaaacgtgatgataaacagaggttttgttgtgagggtattatcaacctactggaaaatgtgacttaatatttgtttctcaaaaccgagaagaataatcaattcctaattttacttttcatagctttatttgttacgaaaaacaagaacgtacatgagacaatgtaatgataaatttatcactggtaagttgatcttgttctt

SEQ ID NO: 118 - DNA, 2836 bp, Arabidopsis thaliana
  source 1..2836: mol_type = genomic DNA
gagaaagatcttctttaacctctttgcaacaaatctactcaaaaccctaacccctttttcaaattacttccatctttagatcgaatcaaatcaatgtccgtcgacgatctccctccgtcgtcggcctccgccgtaacgccactaggctcctccgtgattccgattgtgaacaagctccaagacatattcgctcagctaggaagtcaatcgacgatcgctcttccgcaagtagctgtcgtcggaagtcaaagcagtggcaaatccagcgttctagaagctctcgtcggccgtgactttcttcctcgtggcaatgatatttgcacgcgccgacctctccgtctccagcttgttcagacgaaacctagctctgatggtggatccgatgaagagtggggcgagtttcttcaccacgatcctgttagacgtatctacgatttctctgagattcgccgtgagattgaggcggagactaatagagtatcaggagagaacaaaggtgtatcagatattccgattggtttgaagatattttcacctaatgttttggatattagtcttgtggatcttcctggtatcactaaggttcctgttggtgatcagccaagtgatatcgaagcgcgtataagaacgatgatcttgacttacattaaggaacctagttgcttgatacttgctgttagccctgctaatactgatttagcaaattcagatgcattacaaatcgcaggaaatgctgatcctgatggtcatagaaccataggtgtaatcacaaagttggatattatggacagaggtactgatgctcggaatcaccttctgggaaaaacaattcctcttcgacttggatacgtgggagttgtaaatcgtagtcaagaggatattttgatgaaccgtagcatcaaggatgctcttgttgcagaggaaaagttctttcgtagtcgtccagtttacagcggtctcacagatcgtttgggtgtccctcaactggcaaagaaattaaatcaggtccttgttcaacacatcaaggcactgcttcctagtttaaagtcacgtatcaacaatgcattgtttgctacagcaaaggagtatgagagctatggggatataacagagtctaggggtggtcaaggagctcttctcctcagttttattacaaaatactgcgaagcatactcctctaccctggaagggaaaagtaaagaaatgtcaacatctgagctctcgggtggagcaagaattctctacattttccaatcagtatttgttaagagcttagaggtaatcactgtgtgtagatatctttgtttagttagtggggctatttgcacggaaggcagacagttcgtttcaggttttcagttcttggaagttgatccatgtgaagacttaacagctgatgatattcggactgcaatacaaaatgcaactggtcccagatctgcattatttgttccagatgttccatttgaagttcttgtcaggaggcaaatatctcgtttattagatcccagccttcagtgcgctaggttcatcttcgatgagctagtaaagattagtcatcagtgtatgatgaaagagttacagcggtttccagtcctgcaaaagcgcatggatgaggttattgggaactttctgcgagaaggtcttgaaccttcgcaggcaatgatccgagatcttattgaaatggagatggattatataaacacctcacacccaaattttatcgggggaactaaagccgtggagcaagcaatgcaaacagtcaaatcttctaggattccgcatcctgttgcgcggccaagggatactgtggagcctgagaggacggcttcttccgggagtcaaataaaaacccgatcttttctcggccgacaagctaatggaatcatcactgatcaggcagttccaactgcagcagatgctgaaagacctgcaccagctggaagcacaagctggagtggtttctcatcaatttttcgggggagtgatggtcaggcagctgctaaaaacaacctattaaacaaaccattcagcgaaactactcaagaagtgtatcagaacttgtcaacaatctatttaaaggagcctccaactattttgaagtcatctgaaactcattcagaacaggagtcagttgagattgagataacaaagctattattgaaatcctactatgacattgtaaggaagaatgtcgaggacttggtcccaaaagcaatcatgcattttctggtaaattacacgaaacgtgagctgcacaatgttttcatcgagaagctttacagggagaacttaattgaagaactgttgaaagagcccgatgagttagcgataaagaggaaacgcacgcaagagactcttcgcattcttcagcaggctaatcggacgttagacgagctgccgttagaagctgaatcggtcgagagaggttacaaaattggttcagaagcgaaacatgaggagttaccgggcacaagaagatcaaggacagaaactaatgggaacggacggcttcatatgtaaattcaaattgtgattgcacgcatgactcattcatttggtgatggaaaagatttgttttcttccctttaaatcggttgtgcgtggggaaagaaaggtgttcttaggtatagtgaaacgtgatgataaacagaggttttgttgtgagggtattatcaacctactggaaaatgtgacttaatatttgtttctcaaaaccgagaagaataatcaattcctaattttacttttcatagctttatttgttacgaaaaacaagaacgtacatgagacaatgtaatgataaatttatcactggtaagttgatcttgttctt

SEQ ID NO: 119 - DNA, 3430 bp, Arabidopsis thaliana
  source 1..3430: mol_type = genomic DNA
aaactaaaataaataaggaaaacactcttcttcaaatccagtagagagattcaagacgagtctcatcgaaagttcgaatctttcgtcatctgattagctttctcttagggtttatttcgatttcgatttagtgttctccatcaatggcgacacccatggttagttccgctggaggattactagcaatgctcaacgagcctcatcctgttttgaagcttcatgcgctctctaacctcaacaatttggttgaccaattctggcctgagatctccactagtgtccccatcattgagagtttatatgaagatgaagaattcgatctgcatcaaagacagcttgctgctttgctggtctctaaggttttctattacttgggcgagcttaatgattcgctgtcttatgccctaggagccggtcccttatttgatgtttcagaggattctgattatgttcatacgcttctggccaaagcaatagacgaatatgccagtctcagatcaaaggcagttgagtcaaatgagatggtggacattgatcccaggctagaggcgattgttgaaagaatgcttggaaaatgcatcagtgatgggaagtatcaacaagccatgggcattgcgatagaatgccggagattggataagttggaagaagctatcattaagagcgataatgttcagggaactttatcatattgcatcaatgtttctcattcctttgtcaaccgcagagagtacagacatgaggtgcttagtttacttgtaaaagtctaccagaagctgccctctcctgattatttgagcatttgtcaatgcctcatgtttttggatgaaccgcaaggtgttgcaagcatattggagaagcttcttcgctcagagaacaaggatgatgctttattggcattgcaaattgcatttgatcttgtagagaacgagcaccaggcctttctcttgagtgttagagatcgccttccagctcccaaaacacgtgctgtagaagcaactcaggctgttgaaacaactattgctcctaatgagaacccttcgggagatgttcagatggcagatgaaactccagctcagacaattgtgcatgagacggatccagttgatgctacatatgctgagaggttaacaaagattaagggaattttatctggagagacatctattcagctgacactgcagtttctttacagccacaacaaatcggacctgctgatactgaagacaatcaaacagtctgtagagatgcggaacagtgtatgccacagtgctacaatatatgctaatgccattatgcatgctggaactacagtggacactttccttagagagaatttggattggctaagcagggcaaccaattgggctaagttcagtgctaccgcgggattaggtgttattcacagaggtcacctgcaacagggtaggtcattgatggctccatacttgcctcagggaggagcaggtggtggtgggagtccttattccgaaggaggtgctttatatgctcttggccttattcatgctaaccatggcgagggaatcaagcaatttctacgtgatagcctacgcagcactaatgttgaggtcattcaacatggagcttgtttaggtcttggcttgtcagctctcgggacagctgatgaagagatatatgatgatgtcaaaagcgtgctttatactgacagtgcagttgctggtgaagctgctggcatcagcatgggtttattattggttggaactgctactgaaaaggcaagtgagatgctcgcttatgctcatgagacacaacatgagaagataataaggggattggctctaggaatagctcttacagtatatggtagagaagaaggagcagataccttgattgagcagatgacgagagatcaggatccaatcattcgttatggtggcatgtacgcattggcattggcttacagtggaaccgcaaacaacaaggcaattcgacaattgctgcactttgctgtatctgatgtcagtgatgatgttaggaggactgccgttctggcacttggatttgtcttgtactctgatccagagcagactccccgtattgtatcactgctttctgagtcatacaatccacatgttcgctatggtgcggctcttgcagtgggtatttcttgtgcaggcactggcctcagcgaagcgatatccttgttggagccacttacatcagatgttgttgactttgttcgtcaaggtgctttgattgcaatggccatggtgatggttcaaattagcgaagctagcgattctcgtgttggagtatttaggcgccaacttgagaagattatacttgacaagcacgaagatacaatgagcaagatgggagcgattctggcctctggtatccttgatgctggtggtaggaacgttactataagactgctctctaagaccaaacatgacaaagtcactgctgttatcggccttgcagtcttcagccagttttggtattggtacccactgatctatttcattagtttggccttctcaccaaccgctttcatcggtttgaactatgaccttaaggtcccaaagtttgagttcatgtcacatgcaaaaccgtctttatttgagtacccaaaacccaccacggttcctacagccaataccgccgttaaacttccaaccgctgttctctcaacttcagttaaagccaaagctagggctaagaaagaagcagagcaaaaagctattgctgagaaaacatctggccctgaaaagcctgtcaatgaaagtggatctggaaaaggaaaagcatcaactgagaaggaaggagactctatgcaggtcgatagcccagcagcggtcgagaagaaagcacctgagcctgagccagcgtttgagattttagtgaacccagctcgagtagtcccagctcaagagaaatacataaagttacttgatgacagcagatatgtaccagtgaagctagcaccgtcaggtttcgttcttctcaaagacttgcgtgaacacgagccagaggttctctctctgaccgacgcaccaacttcaacagcttctcctgcaactggtacagcagcggctgcacaaggaaccccggcctcagctatggccgtagatgatgagccacaacctccacaagcctttgaatacgcttcatgattttatttcatttaaaattagtgggaatttgttgttggttttattggtttctgttgaaagacaaaaggcagagagaaaaacagatctttgaactttgagataactgcttcttgtcatttgcaactggtttcatgttcaactacgatcttgtattaggtacttctctttttaagtattatctaaataattaagtgtcgttttatgtcttttagtggtactggtatatctgatttcttctacaacaagatagtaataaactacattttctaagt

SEQ ID NO: 120 - DNA, 1570 bp, Arabidopsis thaliana
  source 1..1570: mol_type = genomic DNA
cctcttcctcttcaagccacaaagactcataaaaatccaacctttttctcatttcctctgttaaatttttcctgaaaagtttattcctttttctacagatcgaatttcgtagttctcacctcactgaatctgttactttctctataatctaaatcttcaaaaatgtttctggttttgtgaaatcaacacttaaaaactcgagcttttacctcctctgttttttcaaagataaaaatgagagaagacgattcagactggttcgcaagatgggaagaagaacttccatcaccagaagagctcatgccaatatcacaatctctaatctcacccgatctagctctagccttcgatatacgaaccccaaatcacggaaacggaaactcaaaccaacctcatcatcatcatcatcaccaaaccacacctcctacaccgtctcagcttcagcttccatcttctcaagccaattcctcagccgaattcgctgcagattcagcagatctaggctccggaggagctgccggagacgaaccagctcggactttaaaacgacctcgtcttgtctggacaccgcagctgcataaacgtttcgttgatgctgttgcgcatttagggattaagaacgcagttcctaaaacgattatgcagcttatgagtgttgatggtttaactagagaaaacgttgcgagtcatttgcaaaagtatagactttatcttaagagaatgcaaggtttgtcttctggtggtggtgctggttcagatccagctactgatcgtcttttcgctagctctcctgttcctgctcactttcttcatcctaatcgtgttcccagttctgatcatttcatgccgtcttttgttcctattgctactcttcaacaacaacaacaaatggctgctgctgcggccgctgctgcagcagctaatcctcatttacaaccgcctcagttccaccgtcaaatcgcagctgcgcattttggttcaccgactaatggtggattcagttcaccgacgagtaatggacagtttggatcaccgactagtaatggatttggatcaccgacgactaatgggaagtttgatccttcgttcttggcggtgaggcaaacgcagcagcaaccaattcagagaatgtctacaccatcattgcatagtccagttagtaattacgttgaggatttggaatctgcaaacgctaatggagggagaactgtcttaactttattcccaactcgagacgattaaaaagtcattatctttccggttactagatgttcaaaatgtctctgcagtcatcaagaacatgagtcagctgatcgttcttgtgcatcggttttatccggtggcgtttactctgtgcagtcttatcagtttaacattgatacaatccagcgtcaatgtgtggtcaagttctgtatctgaagctcaagcaccttcaggtcaaggcttgtattaacccttgtagctttcttgtgtaagattaatgtaaagatgagtttacttttgaacgtacatccgtacgaacaaactcaagattggaaaaaagaatgaaaaaaacaaaaacttacttcac

SEQ ID NO: 121 - DNA, 3856 bp, Arabidopsis thaliana
  source 1..3856: mol_type = genomic DNA
cgccggggactttgatatcatctgcgccgaacaaaaactctgcagaaaccctaattttcgtcagtgattgattcttccgtttccaccatggaagaagtatgcgaaggaaaagaattctcattccctcgtcaagaagaagatgtcctctccttctggactgaaatcgatgctttcaagacacagctcaaacgcactgagaatcttcctgagtacatcttctacgacggacctccttttgccaccggacttcctcactacggacatatcctcgctggtacgattaaagatattgtgactcggtatcagaccatgactggtcaccatgtcactcgtcggtttgggtgggattgtcatggcttacctgttgagaatgagattgatcggaaattgaatattaagaggagagatgaagttattaagatgggaattgataagtataatgaagagtgtaggagtattgtgactcgttatgttgctgagtgggagaaggttattactaggtgtggtcgttggattgattttaagaatgattataagactatggatttgccttttatggaaagtgtttggtgggttttttctcagctttgggagaagaatcttgtttacagaggattcaaggttatgccgtacagtactggttgtaagacacctttatctaattttgaagctggtcagaactataaggaagtccctgatcctgaaatcatggtgacttttccggttattggggatcaagataatgctgcttttgtggcatggactactactccgtggactcttccaagcaatcttgctttgtgtgtaaatgcgaagtttgtctatgtgaaggttcgtaacaagaacactggaaaagtgtacattgttgctgaatctcggttgtctgctcttcccactgataagcctaaggccaagttaagtaatggacctgctggtgatactaagaaagcaaatcctaaagctaaaggtgctaaacctgagagtgcagctgattcttatgaagttttggagaaatttaatggagcttccctggttgggaagaagtatgaacctttgtttgattactttagtgatttctcaagtgaggcctttcgagtagtagcagatgattatgtcactgatgacagtggtactggtattgtccactgtgctcctgcctttggtgaagatgattatcgtgtttgtcttttgaacaaaataatcaaaaagggggagaatctagttgttgctgttgatgatgatgggttgtttactgagagaattacccacttcagtggccgttatgtcaaagatgcagacaaggatataattgaagccgttaaggccaagggcaggcttgttaaaacgggaagctttactcactcatacccattttgctggcgatcagacaccccactcatatatagagcagttccaagttggtttgtgcgtgtggagcagttgaaagaaaagttgttaaaaagcaatgaacagacagaatgggtacctggttatgtgaaggataaacgttttcacaattggctcgaaaatgcaagggattgggcaatcagccgaagtagattttggggcacgcctcttccgatatggataagtgatgatggggaggaagttgtgatcatggattccgtagagaagcttgaaaagctctctggtgttaaggtctttgacctgcatcgtcaccatattgatcatattacaattccatctagtcgtggcgatgagtttggtgtgctccgtcgtgtagaagatgtttttgattgttggtttgagagtgggtcaatgccttacgcgtatatccattatccgtttgaaaacaaggagttatttgagaagaactttcctggtgattttgtggctgaaggtcttgatcagactcgtggatggttttatactcttatggtgttgtctactgcattatttgaaaaaccagcgtttaaaaatctgatttgcaatggtcttgtacttgctgaggatgggaaaaagatggctaagaaattacggaattatccaccacctttggaagtcatagatgagtatggggctgatgctgtgcgattgtacctgataaattctccggttgtacgtgctgagccactacgcttcaaaaaagaaggagtactcggtgttgtcaaagatgtattccttccatggtacaatgcatatcggttcctcgttcagaatgcaaagagacttgagactgaaggtggtgtgccctttgttcctactgatctggcaactatacagtcagcaaacattcttgatcagtggattcactcagctacgcagagtcttgttcgttttgtccgcgaggagatggatgcctatcggctttacactgtggttcctcgtctcttgaagttcctcgacaatctcactaacatatatgtcagattcaaccgcaagagattaaaaggccgtacgggggaagatgattgtcacactgctctttcgactctattcaatgtgctccttacttcttgcaaagtgatggccccgtttacacctttcttcactgaaactttgtaccagaatctgcggaaagcgtgtaaaggttctgaggaaagtgttcactactgcagtattccaccaagggaaggaatggaaggggagaggattgagttaagtgttacgaggatgatgaaaatcattgatcttgctcggaacattcgtgagcgtaacaaactacccttgaaaactcctctaaaggaaatgattgtagtccatcccgatgctgatttcttaaatgacataactggagtactaagagagtatgtcttggaagaacttaacgtgagatcgcttgtaccatgcaatgatactctgaagtatgcatcactaaaagcagaaccagatttcagtgtattgggaaagcgacttggaaagtcgatggggcttgttgcaaaggaagttaaagaaatgtctcaaaaagatatcttagcatttgaggaggctggggaagttactattgctaaccacttgctaaaggaaacagatatcaagattgttagggttttcaaacgcccagacgatttgaaagagaatgagattgattcagctggagatggtgatgttttggtgattctggatctacgagcagatgattctttggttgaagcaggttttgcccgtgagattgtaaacaggatccagaaactaaggaaaaagtcaggtctggaaccaacagactttgtggaagtgtacttccaatcattggacgaggatgaatctgtttctaaacaagttctagtctctcaggaacaaaacatcaaggattcaattggctccactttacttttgtctagtttaatgccatcacatgcagtcataatagccgatgagacattcaccccaaaagaaacatccgatgagagtgtcaaaaaggttccaaagttgtcgtataagataagtttggctagaccggctttgaagttcaatgaagaggctgttcttgctttatactcaggagatgtgaaatctgcaaccgggcttcaaacatacttgttatcaagggatcattcgaatttgaagtcagagttccaagccggagatgggaagataactgtaagctgcattgaaaatgtgcctgttgcgactgtggttcttggcgaacatctccatttgagtgtcggcgatgacttattgagcaagaggaacgcatgagccgtccctccggttttgtttgatttattgtggtaacttgggatttatttcccttatttttcttcttccatatcttacctataaactacttatttagattgttgcaaaaagttaaatctcagtgttgagactctcttttactcgttctatttgtacaatactaaacttttattcatctcaaaatttatggttggac

SEQ ID NO: 122 - DNA, 2933 bp, Arabidopsis thaliana
  source 1..2933: mol_type = genomic DNA
atcttctttctatagtttccatgaagtcttcttcttctcagagctacgatgttttccccaacttcagaggggaagatgtccgccactcattagtcagccaccttcgtaaggaacttgatcgcaaattcatcaatacattcaacgacaacaggatcgaaagaagccgcaaaataaccccagagctgttattggctatagaaaactcaaggatctcacttgtcgtcttctctaaaaactatgcttcttccacgtggtgcttagatgaattggtgaagatccaagagtgctatgagaaattggatcaaatggtgattcctattttctacaaagtagatccttctcatgttagaaaacagaccggagagtttggcatggtctttggggagacctgcaagggcagaacagagaatgagaagcgaaaatggatgcgagctctagcagaggtagcacatctagccggagaagatcttcggaactgataagtttcaggtgggtaaacttccgataagtgattgtcggaacagtgtgtatgaggattaaacacagagaaagatcgtgtggtgattgtagtgtcggtaaacaagtttttaaagcctcccagctgtaatgtatcaaccgtcggaaaggggtgggtcccacgagcctgagtaaagacgcgtagcgaagcagaaatgcttgaaaatatcgccaaggatgtttcaaacaaactcttccccccatcaaataatttcagtgacttcgtcgggattgaagctcatatagaggcattgatatcaatgttgcgcttcgactccaagaaagcgcgaatgatagggatttgtgggccttctgaaactggtaagactactataggaagagctttatacagcagactcaaaagcgacttccaccatcgggctttcgtagcatataagagaaaaatacggagcgactatgaccagaagctgtattgggaagaacaatttctatcagaaattctttgtcagaaggatataaagatagaggaatgtggtgcggtggaacaacgactaaagcacacgaaagttcttattgttcttgatgatgttgatgatatagagctactaaaaacgttggtaggacgtatcagatggtttggatctgagagcaaaattgttgtgattactcaaaaaagggaacttctcaaggctcacaacattgcacatgtttatgaagtgggattcccatcagaagaactggctcatcaaatgttttgtcgatatgcttttgggaaaaactctccacctcatggtttcaacgagcttgcagatgaagctgcaaagattgccggtaatcgtcctaaagctctcaagtacgttggttcgtcttttagaagactagacaaggaacaatgggtgaagatgctatcggagttccgtagtaatgggaataaactaaaaatcagctatgatgagttagatggtaaaggtcaagattacgttgcgtgtttaaccaatggttcaaattcccaggtgaaggcagagtggatccacttggcactaggcgtgtctatattacttaacatccgcagtgacggaacgacaattctcaaacatttgagctacaatcgaagcatggcgcaacaagcaaaaatatggtggtatgaaaatttggaaagagtgtgcaagaagtacaatatatgtggcatagatagctcaactgatggtggtggttcaacgtatggacaatgttcaaattcccaatttcaaagaaacatggacgcaagccccgggggaaacaaaaccagtaatcaatccacaaaagattcaccgagagcttctcaagtagagaaggaaaagatcgagtactgtgagccacatgtatatataacacctgccatcttcagtgacggaaccagagctcccaaatacgtggagtctagtagccgaagagtaacccaagtgcaccacgccaaaacatggtggccggagaattgtgaaaaagtgtacgagaaccacaacaacatatatggcatagatagatcaattgacggtggtgataagtttgagggaaaaagtaaagttagtgacggtgggttagacggcaaagatcaaggttcaatgtatggacaaagttcaaattccgagcttcaaataaacatggacgcagacaataggagatgtgaacctgtgagtgagatgcttttcaaaaattacaatgtgtgttcgcctaatgcacatatgcctgcaggtttaaccgatgtaaactgttcaaatccccagtctcaaagaaaattggacgcaagcctaaagaaagacaaaattgtgcatgagtggattcgaaccggtagtggcttcttttttgattttcagggcccaaaatctatagtgagtgctgctcaagtggacgagaaaaatttcgagtactgtgaacaaggtgtgtatataacacttggcatcctcagtggcggaattatagttctcaaacatttggagttcagccgaagaatggcgcaacaagcaaaagtttggtggtcggaaaattggataaaagtgtaccaggagcacaacatatgtggcatagataaatcatttgatggtaggtttgatgatagacgtgtcattcgtcaattaagaccaaactgaagcacggcctggcccttgtaaaagtcaggacttgagctagatacttaagccaagcagatctgtttggctaagtctggtcgggttagcgcgaaattgtcgaaatctgtttaataattgcattcagtgcaagtctttaatttgtacttcatggctttaatacactaattaaacattggatcatttttagttttttcttcttttcaaaatacatatttttctaagttttccaatttagtgattttattagttctttagtagaatactggatcatggacacatgctacaacatgctttgacctaattatgaaatttatcagcgaatatattatg

SEQ ID NO: 123 - DNA, 960 bp, Arabidopsis thaliana
  source 1..960: mol_type = genomic DNA
tcgtcgccgttaaaatctgcgatctcattgctcattggtgaagacaaatccctaattcgtatgtcagattctgtggccggcgatttccctcccgatccacttctcgcctccggagccttcatctcctccgccggtgacggaaccctagacagtagtgcgaaacgacgaccgattcagggaggaatcggaatttctggttcgggagagagcgtacgcatcgggatggctaacggcactgatcaggtgaatcatcagacggaatcgaagtcgcggaagcgtgcggcgcctggagataattggttgcctcctggttggagagttgaagataagattcgaacttccggtgccacagctggttcggtggataagtactattacgaaccaaatacaggacgtaagtttcggtccaggactgaggtgctgtactacttggaacatggaacttctaaaagaggcaccaagaaagctgagaatacatatttcaatccagaccattttgaaggccaaggaagcaatagagtcaccagaaccgctacagtgcctccacctccgccaccgccattggactttgattttaagaatccaccagacaaggtaagctggtctatggcaaacgcaggagaagaaggttggatacctaatattggggacgtcaaggttcaagactcagtgagacgagattggagcactgcgtttacctttatcacaagccgaaaccctagtaaagtgtcggcttgaagactatgatgacctggtggcgatttttgggttgttgcatctatggtaagatacacagatatgttagggttacttaattggataattcttgtttagtcttcattcatcaatcatcaagttatgtgtactataatttttgtagcggtttttggaagaatatgataaggggatatgcatctttgtgtttgcttttggaacgtgataaccattcgacttttgact

SEQ ID NO: 124 - DNA, 464 bp, Cardiovirus A
  source 1..464: mol_type = other DNA
gagggcccggaaacctggccctgtcttcttgacgagcattcctaggggtctttcccctctcgccaaaggaatgcaaggtctgttgaatgtcgtgaaggaagcagttcctctggaagcttcttgaagacaaacaacgtctgtagcgaccctttgcaggcagcggaaccccccacctggcgacaggtgcctctgcggccaaaagccacgtgtataagatacacctgcaaaggcggcacaaccccagtgccacgttgtgagttggatagttgtggaaagagtcaaatggctctcctcaagcgtattcaacaaggggctgaaggatgcccagaaggtaccccattgtatgggatctgatctggggcctcggtgcacatgctttacatgtgtttagtcgaggttaaaaaaacgtctaggccccccgaaccacggggacgtggttttcctttgaaaaacacgatgataat

SEQ ID NO: 125 - DNA, 228 bp, Tobacco mosaic virus
  source 1..228: mol_type = other DNA
atctaagttaggttgtaaacatattagagacgttgttcatttggaagagttacgcgagtctttgtgtgatgtagctagtaacctaaataattgtgcgtatttttcacagttagatgaggccgttgccgaggttcataagaccgcggtaggcggttcgtttgctttttgtagtataattaaatatttgtcagataagagattgtttagagatttgttctttgtttgata

SEQ ID NO: 126 - DNA, 101 bp, Hibiscus chlorotic ringspot virus
  source 1..101: mol_type = other DNA
tagcttgtttgggttctttatcactgtcctgattaaggctgaatcagaacactttcacttccacacacacgacagtagtaagacacaaaatatagtagtta

SEQ ID NO: 127 - DNA, 147 bp, Zea mays
  source 1..147: mol_type = other DNA
agcacaacatttcaaccagaaacactagccgaagcaaatccattccacaagcacctggtgggatcatctcatcatcagaaaccaagagagagattccgtgtccgcttgttgtagtagattgtgaggactgaggaccgagaagcagcc

SEQ ID NO: 128 - DNA, 196 bp, Plautia stali intestine virus
  source 1..196: mol_type = other DNA
aagctgactatgtgatcttattaaaattaggttaaatttcgaggttaaaaatagttttaatattgctatagtcttagaggtcttgtatatttatacttaccacacaagatggaccggagcagccctccaatatctagtgtaccctcgtgctcgctcaaacattaagtggtgttgtgcgaaaagaatctcacttcaa

SEQ ID NO: 129 - DNA, 174 bp, Kashmir bee virus
  source 1..174: mol_type = other DNA
aatttaaatatgttaataatgctgaagacaagtatttcgattattaacctctatatttctatataaagtatctgtgagtctcagtggacatcacagtaaggtcgcagttaacttgtaatcttttcattcctgtgtcggagcagtggtaatggagccggacgatttcgccaaaac

SEQ ID NO: 130 - DNA, 204 bp, Solenopsis invicta virus 1
  source 1..204: mol_type = other DNA
aacgtttctcttctggttaccagcaacataggaaattgtcgttgaactacatgttgtaaggctttagagaaataagggagtgtcctatttaggatgaggtgctccggtggcagccccaccaaaacctctagcgactaggaacagctatatcgggttgctatagcagtcaggatgtcattctggcgttccgaaatacccaaacct

SEQ ID NO: 131 - DNA, 178 bp, Triatoma virus
  source 1..178: mol_type = other DNA
tgatcttgctttcgtaataaaattctgtacataaaagtcgaaagtattgctatagttaaggttgcgcttgcctatttaggcatacttctcaggatggcgcgttgcagtccaacaagatccagggactgtacagaattttcctatacctcgagtcgggtttggaatctaaggttgactc

SEQ ID NO: 132 - DNA, 211 bp, Cricket paralysis virus
  source 1..211: mol_type = other DNA
taaaaagcaaaaatgtgatcttgcttgtaaatacaattttgagaggttaataaattacaagtagtgctatttttgtatttaggttagctatttagctttacgttccaggatgcctagtggcagccccacaatatccaggaagccctctctgcggtttttcagattaggtagtcgaaaaacctaagaaatttacctgctacatttcaagata

SEQ ID NO: 133 - DNA, 353 bp, Cricket paralysis virus
  source 1..353: mol_type = other DNA
ttcgataccaagagctggtgtctgagggattacgactcgcgtggtcggacagcacatgttagtcatgtattatggtgtttcccaacacgtatctttgctctagtattgaactttagtgatgagtgtacttggcatgtacacctgattagttagcccttgtggatacgccactgccgctcaggtacagtaggacataccccaaatattgggttccactcgtagagaagaaaattagtggcgaaacgtacggtttatgtcaaaggagaaggtgattttaattgcacctgaagcaaccctaggtcttccctttgatgtgagctaataaggagtaaccgattcttacaatgtgatca

SEQ ID NO: 134 - DNA, 232 bp, Hepacivirus C
  source 1..232: mol_type = other DNA
gcctccaggaccccccctcccgggagagccatagtggtctgcggaaccggtgagtacaccggaattgccaggacgaccgggtcctttcttggataaacccgctcaatgcctggagatttgggcgtgcccccgcaagactgctagccgagtagtgttgggtcgcgaaaggccttgtggtactgcctgatagggtgcttgcgagtgccccgggaggtctcgtagaccgtgcacc

SEQ ID NO: 135 - DNA, 116 bp, Turnip crinkle virus
  source 1..116: mol_type = other DNA
ctctctctcactggtcctcctactttgtcatctgattcctgaaatcaaaccgattcacacatcctacaacacacacgactcatcgaagcagcaacacataagcatcaacactggaa

SEQ ID NO: 136 - DNA, 148 bp, Turnip vein-clearing virus
  source 1..148: mol_type = other DNA
gaattcgtcgattcggttgcagcatttaaagcggttgacaactttaaaagaaggaaaaagaaggttgaagaaaagggtgtagtaagtaagtataagtacagaccggagaagtacgccggtcctgattcgtttaatttgaaagaagaaa

SEQ ID NO: 137 - DNA, 579 bp, Rhopalosiphum padi virus
  source 1..579: mol_type = other DNA
gataaaagaacctataatcccttcgcacaccgcgtcacaccgcgctatatgctgctcattaggaattacggctccttttttgtggatacaatctcttgtatacgatatacttattgttaatttcattgacctttacgcaatcctgcgtaaatgctggtatagggtgtacttcggatttccgagcctatattggttttgaaaggacctttaagtccctactatactacattgtactagcgtaggccacgtaggcccgtaagatattataactattttattatattttattcaccccccacattaatcccagttaaagctttataactataagtaagccgtgccgaaacgttaatcggtcgctagttgcgtaacaactgttagtttaattttccaaaatttatttttcacaatttttagttaagattttagcttgccttaagcagtctttatatcttctgtatattattttaaagtttataggagcaaagttcgctttactcgcaatagctattttatttattttaggaatattatcacctcgtaattatttaattataacattagctttatctatttata

SEQ ID NO: 138 - DNA, 367 bp, Homo sapiens
  source 1..367: mol_type = other DNA
aattccagcgagaggcagagggagcgagcgggcggccggctagggtggaagagccgggcgagcagagctgcgctgcgggcgtcctgggaagggagatccggagcgaatagggggcttcgcctctggcccagccctcccgctgatcccccagccagcggtccgcaacccttgccgcatccacgaaactttgcccatagcagcgggcgggcactttgcactggaacttacaacacccgagcaaggacgcgactctcccgacgcggggaggctattctgcccatttggggacacttccccgccgctgccaggacccgcttctctgaaaggctctccttgcagctgcttagacgctggatttttttcgggt

SEQ ID NO: 139 - DNA, 222 bp, Israeli acute paralysis virus
  source 1..222: mol_type = other DNA
gtatagtgttctggaggcatcattctatggttacccatcattagaggaaatttccaataaactctggtgtaaggcttagagtgatggtcgaggtgccctatttagggtgaggagcctcggtggcagccccaccaaatcctctattggataggaacagctgtactgggcagttacagcagtcgtatggtaacacatgcggcgttccgaaataccatgcctggc

SEQ ID NO: 140 - DNA, 174 bp, Drosophila C virus
  source 1..174: mol_type = other DNA
aatgattttgaaacatattaagatgtttatacgagcgtgttgtttactattttcaggatatgtggaagcggttgtgtatgatctatacgcacatttagttcccagagggcgttgtcgtctccccctaagcaagggagaaacacgtggcacatgatcttgcgcttaacgataaaa

SEQ ID NO: 141 - DNA, 190 bp, Black queen cell virus
  source 1..190: mol_type = other DNA
ccaacaatgtgatcttgcttgcggaggcaaaatttgcacagtataaaatctgcaagtagtgctattgttggaatcaccgtacctatttaggtttacgctccaagatcggtggatagcagccctatcaatatctaggagaactgtgctatgtttagaagattaggtagtctctaaacagaacaatttacct

SEQ ID NO: 142 - DNA, 174 bp, Homalodisca coagulata virus 1
  source 1..174: mol_type = other DNA
ttgcctctctcaacaaaaagccaccgacattaagagagagagtattgctgcttagttaactgcaggccctatttagggttaccgcccaggatctgcaacagcattcctgtatcatccagggcaccggtggacttggtgaggattgagttgacctcatcattagagaccagactc

SEQ ID NO: 143 - DNA, 184 bp, Aphid lethal paralysis virus
  source 1..184: mol_type = other DNA
aattactaatttgatctttaggttataatgttaggactataaaaattagcttaatgcatttagtaatttaaggcttagttatttaactttacttatcaagatggccgttggcagccccacgaaatctagattagtccgaatgtcctattttgattaggtggtcagataggtcagaaactcacct

SEQ ID NO: 144 - DNA, 174 bp, Himetobi P virus
  source 1..174: mol_type = other DNA
catccgtaatacaacccggaataacctccaaaccgagaagaactagtctatgaccagacgaaaaggaactagtccctgttcttttcttagggcctttttcacctgggtaaagtgtagttattgcgtataactctggtatcaataccacccggaagaaattatttatctgccatc

SEQ ID NO: 145 - DNA, 174 bp, Mud crab virus
  source 1..174: mol_type = other DNA
catttatttatattaaatactgacactttgcgggttaaaatgtttaatactatttttcaatttgaggttgtatgagataattttgatttctatgttatcattgaataagggagtctggccctaattgatgtacgactcttctttggttgcgacccgagtcccttctacatcaag

SEQ ID NO: 146 - DNA, 642 bp, Cadicivirus A
  source 1..642: mol_type = other DNA
aactctaagccgaacaattatagctaggctttttattatataacattaattaggcattagcgttgtcgccaatctcttggtaatcctaaggatacctttcctgttgactaagatgaagcgccttcggttaccgatgcccggtgtccacgaagccatcgtggtcggccgcgtcccccacctctcccaacttggactccatgttttcagtaggtgtaatgattagtattattgattctgctcgttcaatgtgtttatcttcacgatctgggacccaacacatgcttcactcatgtttaaatgttggttccctcattttgaagacacccaaaccatagagtgcgagaatgaggatttctacttccattctggtaacagaaatgaattcctgcgtgtgtctcgtaaatggaatctttaagaacttcagataaatcgaacaatacactaatacaagttgttttctaccaacatgttcaatgcggctaatctgaccgtggagctgtgaagcgctcaaacccgagtgttgtatacagtcgtaatgcgtaagtccatgaggaaccgactactgttacctctgttggtgtgtttctcctttattctcttttattattatttgttattgcaaatactacaactttgatcaac

SEQ ID NO: 147 - DNA, 130 bp, Arabidopsis thaliana
  source 1..130: mol_type = genomic DNA
gtaaggatttttatgatatagtatgcttatgtattttgtactgaaagcatatcctgcttcattgggatattactgaaagcatttaactacatgtaaactcacttgatgatcaataaacttgattttgcag

SEQ ID NO: 148 - DNA, 91 bp, Arabidopsis thaliana
  source 1..91: mol_type = genomic DNA
gtaacattccttagttacctttcttttctttttccatcataagtttatagattgtacatgctttgagatttttctttgcaaacaatctcag

SEQ ID NO: 149 - DNA, 108 bp, Arabidopsis thaliana
  source 1..108: mol_type = genomic DNA
gtgctcttgaaattggaactcttcttttgttgtctaaacctatcaatttctttgcggaaatttatttgaagctgtagagttaaaattgagtcttttaaacttttgtag

SEQ ID NO: 150 - DNA, 101 bp, Arabidopsis thaliana
  source 1..101: mol_type = genomic DNA
gtaagttgttacttatgattgttttcctctctgctacatgtattttgttgttcatttctgtaagatataagaattgagttttcctctgatgatattattag

SEQ ID NO: 151 - DNA, 121 bp, Arabidopsis thaliana
  source 1..121: mol_type = genomic DNA
gttagtatcatatgaagaaatacctagtttcagttgatgaatgctattttctgacctcagttgttctcttttgagaattatttcttttctaatttgcctgatttttctattaattcattag

SEQ ID NO: 152 - protein, 124 aa, Arabidopsis thaliana
GTAAATCCTGGTCCACACTTTTACGATAAAAACACAAGATTTTAAACTATGAACTGATCAATAATCATTCCTAAAAGACCACACTTTTGTTTTGTTTCTAAAGTAATTTTTACTGTTATAACAG

SEQ ID NO: 153 - protein, 136 aa, Arabidopsis thaliana
GTAAGAGGTCAAAAGGTTTCCGCAATGATCCCTCTTTTTTTGTTTCTCTAGTTTCAAGAATTTGGGTATATGACTAACTTCTGAGTGTTCCTTGATGCATATTTGTGATGAGACAAATGTTTGTTCTATGTTTTAG

SEQ ID NO: 154 - DNA, 150 bp, Arabidopsis thaliana
  source 1..150: mol_type = genomic DNA
gtaagttctgcatttggttatgctccttgcattttaggtgttcgtcgcacttccatttccatgaatagctaagattttttttctctgcattcattcttcttgcctcagttctaactgtttgtggtatttttgttttaattattgctacag

SEQ ID NO: 155 - DNA, 121 bp, Arabidopsis thaliana
  source 1..121: mol_type = genomic DNA
gtaaagcaactgtgttttaatcaatttcttgtcaggatatatggattataacttaatttttgagaaatctgtagtatttggcgtgaaatgagtttgctttttggtttctcccgtgttatag

SEQ ID NO: 156 - DNA, 136 bp, Arabidopsis thaliana
  source 1..136: mol_type = genomic DNA
gtaaagtttccaactttcctttaccatatcaaactaaagttcgaaactttttatttgatcaacttcaaggccacccgatctttctattcctgattaatttgtgatgaatccatattgacttttgatggttacgcag

SEQ ID NO: 157 - DNA, 121 bp, Arabidopsis thaliana
  source 1..121: mol_type = genomic DNA
gtctgtctttcctatttcatatgtttaatcctaggaatttgatcaattgattgtatgtatgtcgatcccaagactttcttgttcacttatatcttaactctctctttgctgtttcttgcag

SEQ ID NO: 158 - DNA, 159 bp, Arabidopsis thaliana
  source 1..159: mol_type = genomic DNA
gtaaaatattggatgccagacgatattctttcttttgatttgtaactttttcctgtcaaggtcgataaattttattttttttggtaaaaggtcgataatttttttttggagccattatgtaattttcctaattaactgaaccaaaattatacaaaccag

SEQ ID NO: 159 - DNA, 109 bp, Arabidopsis thaliana
  source 1..109: mol_type = genomic DNA
gtaaggacttctcatgaatattagtggcagattagtgttgttaaagtctttggttagataatcgatgcctcctaattgtccatgttttactggttttctacaattaaag

SEQ ID NO: 160 - DNA, 189 bp, Solanum tuberosum
  source 1..189: mol_type = genomic DNA
gtttgtttctgcttctacctttgatatatatataataattatcattaagtagtagtaatataatatttcaaatatttttttcaaaataaaagaatgtagtatatagcaattgcttttctgtagtttataagtgtgtatattttaatttataacttttctaatatatgaccaaaacatggtgatgtttag

SEQ ID NO: 161 - DNA, 94 bp, Cucumber mosaic virus
  source 1..94: mol_type = other DNA
gtttatttacaagagcgtacggttcaatccctgcctcccctgtaaaactaccctttgaaaacctctctttcttaatcttttctttgtaattcct

SEQ ID NO: 162 - DNA, 74 bp, Brome mosaic virus
  source 1..74: mol_type = other DNA
gtagaccacggaacgaggttcaatcccttgtcgaccacggttctgctacttgttctttgtttttcaccaacaaa

SEQ ID NO: 163 - DNA, 107 bp, Citrus tristeza virus
  source 1..107: mol_type = other DNA
aatttcacaaattcaacctgttcgcccagaaaatacgtctggcacaacagggatccggaataggtccagcctttaagctctaatattcccacaacaaaaattacact

SEQ ID NO: 164 - DNA, 107 bp, Beet yellows virus
  source 1..107: mol_type = other DNA
gtttttaaccatccttctactagacgtacactcgtacatcctctagtatttcctttatttatcttcccataagcccctgcctttaacgtttaactctcgctatcgac

SEQ ID NO: 165 - DNA, 206 bp, Cowpea mosaic virus
  source 1..206: mol_type = other DNA
tattaaaatcaatacaggttttgataaaagcgaacgtggagaaatccaaacctttctttctttcctcaatctcttcaattgcgaacgaaatccaagctttggttttgctgaaacaaatacacaacgtatactgaatttggcaaatttctctctctctctctgtcattttctttcttctgtcgggactttcttagtcttgacccaac

SEQ ID NO: 166 - DNA, 84 bp, Potato virus X
  source 1..84: mol_type = other DNA
gaaaactaaaccatacaccaccaacacaaccaaacccaccacgcccaattgttacacacccgcttggaaaagcaagtctaacaa

SEQ ID NO: 167 - DNA, 161 bp, Potato virus A
  source 1..161: mol_type = other DNA
aaaataaacaaactacaaaacacaatcaagaaatcaaacgaattagagcaatcaatcttctaaatcttcaagcagttcacaacattttaaacacaatcaaaacttgaacaagttcaatcaaacacccaaattcagtttaaatactcaaaacgcaagcatca

SEQ ID NO: 168 - DNA, 184 bp, Potato virus Y
  source 1..184: mol_type = other DNA
aattaaaacaactcaatacaacataagaaaaacaacgcaaaaacactcataaacgctcattctcactcaagcaacttgctaagtttcagtttaaatcatttccttgcaattctctagaacaatattggaaaccatttcaactcaacaagcaatttcatcacttccaaccaatttcagatcctca

SEQ ID NO: 169 - DNA, 167 bp, Pepper mottle virus
  source 1..167: mol_type = other DNA
aaattaaaacataacatacaacataaacgaaagcaatcaaattttcaagcatttttcttgagctctttgatttttcctgcataaattaagcactttgatcaacaacatagtctcgatttgaatatttcaattgtttccagttttctctaatagcactccatactaaa

SEQ ID NO: 170 - DNA, 190 bp, Bean yellow mosaic virus
  source 1..190: mol_type = other DNA
aaaaaatataaaaactaaacaagacaatacaagacataacgcattcagaccttcaaacattcgcaagctttaaacaactttgtgtgaatttcgagtataagatttctaaaattctaaaattaaagtaattagtctttctttaagtgtcaatcaaatttgagtttttcgttattactattgcaagcttata

SEQ ID NO: 171 - DNA, 91 bp, Barley stripe mosaic virus
  source 1..91: mol_type = other DNA
gtatgtaagttgcctttgggtgtaaaatttcttgcatgcacataatcgtaatcgattcttcttgatctctaaacaacactttcccgttagc

SEQ ID NO: 172 - DNA, 115 bp, Wheat stripe mosaic virus
  source 1..115: mol_type = other DNA
cgaaagttaacactgagtacacacgatcccttgataccagcagcatctgtgagcttgtttggttaggcaacgcgggtcgaggtttactctgattgtacactggaaattatcagca

SEQ ID NO: 173 - DNA, 79 bp, Rice yellow mottle virus
  source 1..79: mol_type = other DNA
acaattgaagctaggaaaggagcatattgcgaaagcatccctccttccgacgaacaattgtagccacactgcatcgtgt

SEQ ID NO: 174 - DNA, 139 bp, Maize dwarf mosaic virus
  source 1..139: mol_type = other DNA
aaaaacaacaagactcaacacaacacaaccaaacacgaccaaacacaaccaaattacacgttattggagcacattcagtttgcaggcaacggttcgtttgcaaggtgcatcgaaaagcctctctgaacacacgatcgca

SEQ ID NO: 175 - DNA, 138 bp, Zucchini yellow mosaic virus
  source 1..138: mol_type = other DNA
aaattaaaacaaatcacaaagactacagaaatcaacgaacaagcagacgatttctaaaccgtgtttacaaacaagcaatctataattcgcacagcatcaagaatttctgcaatcactttgtttattttagacacaaca

SEQ ID NO: 176 - DNA, 132 bp, Watermelon mosaic virus
  source 1..132: mol_type = other DNA
aaattaaaactactcataaagacatcaaacaaaacaaacgcaaacaaattctcaagttttcaagctatttcaagcaatttgcattttcgatatttataagtttacgattcatcaatatcaacaacaacacga

SEQ ID NO: 177 - DNA, 148 bp, Sugarcane mosaic virus
  source 1..148: mol_type = other DNA
aaaacaacaaaactcaatacaacacaacaaaacacatccaagcaaaccaacgacatttgcaatcaaacttcagcgcacggctcaaaagagaaggctctttgagaacgctctctgaacttccctccttcggcattcgacttccggcgag

SEQ ID NO: 178 - DNA, 68 bp, Tobacco mosaic virus
  source 1..68: mol_type = other DNA
gtatttttacaacaattaccaacaacaacaaacaacaaacaacattacaattactatttacaattaca

SEQ ID NO: 179 - DNA, 71 bp, Tomato mosaic virus
  source 1..71: mol_type = other DNA
gtatttttacaacaattaccaacaacaacaacaaacaacaacaacattacattttacattctacaactaca

SEQ ID NO: 180 - DNA, 67 bp, Turnip vein-clearing virus
  source 1..67: mol_type = other DNA
gtttagttttattgcaacaacaacaacaaattacaataacaacaaacaaaatacaaacaacaacaac

SEQ ID NO: 181 - DNA, 69 bp, Pepper mild mottle virus
  source 1..69: mol_type = other DNA
gtaaatttttcacaatttaacaacaacaacacaaacaacaaacaacattacaaacaaaatacaactaca

SEQ ID NO: 182 - DNA, 63 bp, Turnip crinkle virus
  source 1..63: mol_type = other DNA
ggtaatctgcaaatccctggcacccgcctaaaattgccctcatcaaccttctctctattcacg

SEQ ID NO: 183 - DNA, 165 bp, Tomato bushy stunt virus
  source 1..165: mol_type = other DNA
naaattctccaggatttctcgacctagttcgtttatctggtgacttgcgctaccgttgctttgcgtagagaatttctctccataattattatctttagttgtggggtttgaaggttgggtctacctttcggggggataaattgtaacttccaacaaacaagcgac

SEQ ID NO: 184 - DNA, 33 bp, Tomato spotted wilt orthotospovirus
  source 1..33: mol_type = other DNA
agagcaatcaggtaacaacgattttaagcaaac

SEQ ID NO: 185 - DNA, 32 bp, Watermelon bud necrosis orthotospovirus
  source 1..32: mol_type = other DNA
agagcaatcgtgcaacaataagaatatcagta

SEQ ID NO: 186 - DNA, 87 bp, Turnip yellow mosaic virus
  source 1..87: mol_type = other DNA
gtaatcaactaccaattccagctctcttttgacaactggtcttatacccacttccgtacacttgcaaccctcgtaagacaattgcaa

SEQ ID NO: 187 - DNA, 281 bp, Cucumber mosaic virus
  source 1..281: mol_type = other DNA
cggtctccctcttcgggcgggatctgagttggcggtaatctgcaaaccgtctgaagtcactaaacacattgtgtggtgaacgggttgtccatccagctaacggctaaaatggtcagtcgtggagaaatccacgccagtagacttacaagtctctgaggcacctttgaaaccatctcctaggtttcttcggaaggacttcggtccgtgtacttctagcacaacgtgctagtttcagggtacgggtgccccccactttcgtgggggtctctaaaaggagacca

SEQ ID NO: 188 - DNA, 274 bp, Brome mosaic virus
  source 1..274: mol_type = other DNA
tgcgcttgtctctgtgtgagacctctgctcgaggagagccctgttccaggtaggaacgttgtggtctaactcaagactagctgaatcggtgctataaccgatagtcgtggttgacacgcagacctcttacaagagtgtctaggcgcctttgagagttactctttgctctcttcggaagaacccttaggggttcgtgcatgggcttgcatagcaagtcttagaatgcgggtgtcgtacagtgttgaaaaacactgtaaatctctaaaagagacca

SEQ ID NO: 189 - DNA, 273 bp, Citrus tristeza virus
  source 1..273: mol_type = other DNA
ttgaagtggacggaataagttcctcgcggaactttgtgttgggttggtaaagacccttatgatggtgatatatcactagacaataaccggatgggtaaagtctttaaaatgatcgaggggaaaattaaccgtatcctctcgttggtctaagctcccacagagtggtagtggtctcaagtgaggcttaacgtatgcgtgaaccaaagaagttctccttagagtgtgtgttgtttacccaacgcactgtccctatggggggccaacataggtcca

SEQ ID NO: 190 - DNA, 182 bp, Beet yellows virus
  source 1..182: mol_type = other DNA
tagagaagtgacggaggcgacctacctaccgtgtaatttaagtcgtcacagagtgacaacggcaccaagtggtgcttagtgcgtatgtaaattacgaagtgcaaaaaatttttctttttatattaagaaaatttttgcacactcctagcgaagtcccgctaggaagaaaaaataaggggccc

SEQ ID NO: 191 - DNA, 72 bp, Potato virus X
  source 1..72: mol_type = other DNA
ctacgtctacataaccgacgcctaccccagtttcatagtattttctggtttgattgtatgaataatataaat

SEQ ID NO: 192 - DNA, 227 bp, Potato virus A
  source 1..227: mol_type = other DNA
taaccgaagtgccgtactattactaagtaagagttcctgttagtatccttgtcttattattagaatacgtttatctttcaacaagtatgatgttcgtgctctcacctcgcaacagtgagtttgagtgggaaataaatactagtattctatggccttacttgttatatagacccaccacatagtgagattttatctcggtgactggttttatgtttcaactgtcaggg

SEQ ID NO: 193 - DNA, 328 bp, Potato virus Y
  source 1..328: mol_type = other DNA
tgtagtgtctctccggacgatatataagtatttacatatgcagtaagtattttggcttttcctgtactacttttatcataattaataatcgtttgaatattactggcagataggggtggtatagcgattccgtcgttgttagtgaccttagctgtcggttctgtattattaagtcttagataaaaagtgccgggttgttgttgtgtgactgatctatcgattaggtgatgctgtgattctgtcatagcagtgactatgtctggatttagttacttgggtgatgctgtgattctgtcatagcagtgactgtaaacttcaatcaggagac

SEQ ID NO: 194 - DNA, 266 bp, Pepper mottle virus
  source 1..266: mol_type = other DNA
ctgatgtggtctctgggatgaaatattattatatgtagtatgcaatatatagtatggcttttctcgttccagtctttatattaatgagagtaacttaagtaagtaatttgtacttcaaggattaatcaaggtgactctctgacactctcagtgaggtgacttgtttagtctgagtttacttattgtgagtataaagaatctctcagaaaacgagagtgacttctagacacactctaggaggtgatcgtagttggcatgagagagac

SEQ ID NO: 195 - DNA, 171 bp, Bean yellow mosaic virus
  source 1..171: mol_type = other DNA
agtatccgtctttaaattctctataatttggcgttacattacttaatactatgtattagtgaggtttcacctccagcattttaaattcagtatgtgtatcattctctctactctgacagggtaagcagttagtgaggttgcctcgtgtgagcctgatctttgtagagcgag

SEQ ID NO: 196 - DNA, 257 bp, Barley stripe mosaic virus
  source 1..257: mol_type = other DNA
aaaaaaaaaaaaaaaaaaatgtttgatcagatcattcaaatctgatggtgcccatcaaccatatgatgggagtgtttgcaagtccactataatcgaacttgaaaacgatgcctgaattggaaaccatgaatcttaacggattctggagagaaaatttaggaattggtatgtaagctacaacttccggtagctgcgtcacactttaagagtgtgcatactgagccgaagctcagcttcggtcccccaagggaagacca

SEQ ID NO: 197 - DNA, 350 bp, Wheat stripe mosaic virus
  source 1..350: mol_type = other DNA
gcgttgtcactcgtccgaagacgttaaactacggtgtcgttcattcgacgtgagattctgagttatgggtattgctacaaacccacacgaggtggtcgtccgtgcctgacattaagttgttgggatagaccagggcaagtcgggactttggctagaagtttgtgggtaacttcactgttaaaccctctggttcaacgtcagaaccacctaggagataatactctgggtttagttggcgtctgttgtaattatttataattcagcattttaaaatttcaagaaggtctttgaccatatagttgtactgggtgtgagttgtaccagtgtgttgttaactatgtttgtgtata

SEQ ID NO: 198 - DNA, 246 bp, Rice yellow mottle virus
  source 1..246: mol_type = other DNA
atccacggattggctacgagatcgacttaccctgaaaaggatgttgagcgttcttgaacgcggcccaatcctacgagatgatactggtgactatcctacgtgaggagttgcactcacgcttcaacccaaagcgacccatgcactggacagtgcttacccagatggttttcggagctactgggcggacctttcaccaaaccgaattccccactctttccgagagaattctcgggatgggtgggggag

SEQ ID NO: 199 - DNA, 250 bp, Maize dwarf mosaic virus
  source 1..250: mol_type = other DNA
tacggggttcaacttttacgcagtaatttagtaatatataagtaagctattgtggtgaggttgtacctcgttagttttatatatatattatgctacgtacctactatgtctgcaagtgagtgaggttgcacctcgacacttatagtgggcactattactagcttcgaatcacgagacggacggtccattgagtggttctaccacgaggatgcagcgagtttcgtggtgagagacaaaaaaaaaaaaaaaa

SEQ ID NO: 200 - DNA, 213 bp, Zucchini yellow mosaic virus
  source 1..213: mol_type = other DNA
taaagggtaggtcacctacctaggttatcgattcgctgccgacgtaattctaatatttaccgctttttatgatatctttagatttcagtgtgggcctcccacctttaaagcgtaaagtttatgttagttgtccaggaatgccgtagtcctgtcggaagctttagtgtgagcctctcacggataagctcgagattagactccgtttgcaagcct

SEQ ID NO: 201 - DNA, 249 bp, Watermelon mosaic virus
  source 1..249: mol_type = other DNA
agactaggtaaactggtcacagttagcatttcgggtcgttataagttttctataatataatatgttgcactttttagtatagtgtgattttatcacctttgtactgtttatgttagtgtggtttaaccatcttagtgtgctttatattatagtttatgcataacagggagaaccattacaataccggagttgtttgtagtgtgattacatcacggttaatagccgaggtacggtaatgtttgttgtcct

SEQ ID NO: 202 - DNA, 235 bp, Sugarcane mosaic virus
  source 1..235: mol_type = other DNA
tctcctggaaaccctgtttgcagtatctatagtatgttatgtgtactagtattaaaagtgaggctttgtctcgtttctgcttttactatttacgtactataagtgtgaaccagtctgcaagatacagggttggacccagtgtcttctggtgtagcacatactagcgtcgagccatgtcacggacagcgctgaggatggctttgccatgtgtgctgcgagtctcatggtgagagac

SEQ ID NO: 203 - DNA, 204 bp, Tobacco mosaic virus
  source 1..204: mol_type = other DNA
ggtagtcaagatgcataataaataacggattgtgtccgtaatcacacgtggtgcgtacgataacgcatagtgtttttccctccacttaaatcgaagggttgtgtcttggatcgcgcgggtcaaatgtatatggttcatatacatccgcaggcacgtaataaagcgaggggttcgaatccccccgttacccccggtaggggccca

SEQ ID NO: 204 - DNA, 201 bp, Tomato mosaic virus
  source 1..201: mol_type = other DNA
atgcataggtgctgaaatataaattttgtgtttctaaaacacacgtggtacgtacgataacgtacagtgtttttccctccacttaaatcgaagggtagtgtcttggagcgcgcggagtaaacatatatggttcatatatgtccgtaggcacgtaaaaaagcgagggattcgaattcccccggaacccccggttggggccca

SEQ ID NO: 205 - DNA, 235 bp, Turnip vein-clearing virus
  source 1..235: mol_type = other DNA
gcgtagtgcgcacgatagcgcatagtgtttttctctccacttaaatcgaagagataaacttacggtgtaattccgtgagggtggcgtaaaccaaattacgcaatgttttgggttccattaaaatcgaaaccccttatttcctggatcacctgttaacgcacgtttgacgtgtattacagtgggaataagtaaaagtgagaggttcgaatcctccctaaccccgggtaggggccca

SEQ ID NO: 206 - DNA, 199 bp, Pepper mild mottle virus
  source 1..199: mol_type = other DNA
acatgatggcataaataagttgaacgaacattaaacgtccgtggcgagtacgataactcgtagtgtttttccctccacttaaatcgaagggttgtcgttgggatggaacgcaattaaatacatgtgtgacgtgtatttgcgaacgacgtaattatttttcaggggttcgaatcccccccgaaccgcgggtagcggccca

SEQ ID NO: 207 - DNA, 255 bp, Turnip crinkle virus
  source 1..255: mol_type = other DNA
tacggtaatagtgtagtcttctcatcttagtagttagctctctcttatattaagaaaagaaaacaaaaacccccaggtcgctttattttgacctgtgttagggaccaaaaacggtggcagcactgtctagctgcgggcattagactggaaaactagtgctctttgggtaaccactaaaatcccgaaagggtgggctgtggtgaccttccgaactaaaagatagcctccctcctcgcgcggggggggggcctgccc

SEQ ID NO: 208 - DNA, 370 bp, Tomato bushy stunt virus
  source 1..370: mol_type = other DNA
gacagactcttcagtctgagtttgtggagatgagtgtaaatctggcatagcatacaggttactcttgttgggttctggatgttaggatgacgagtcgactcgggctccgcactaggtttggtcgcctaggggatggagatatggaaagggtctcgtgtggtatcagtcggtcgaaagacgcgcttccaacatgggcctatggtcggataagtcttagcaataccagccagcatgaattggattcctgtttacgaaagttaggtgtcacttgtggaagcggacccagacacggttgatctcacccttcggggggctatagagatcgctggaagcactaccggacaaccggaacattgcagaaatgcagccc

SEQ ID NO: 209 - DNA, 241 bp, Tomato spotted wilt orthotospovirus
  source 1..241: mol_type = other DNA
attaatagtaatgctcaacaatgcatggataatggattagatagaacttagaatacaaatttattgttattttagaattaggttagatctgattagactaaagacgatttggtgaaccaaatctatagtgtatgtaaatgtggagtcccggtatagtttcactggagggaattcttatatatcttatttgtaaagtctggttatggagagattatatgttttagttgtacctgattgctct

SEQ ID NO: 210 - DNA, 215 bp, Watermelon bud necrosis orthotospovirus
  source 1..215: mol_type = other DNA
ataagccatagaatagacagtatagaaccagaagcagtaaaagagcatgacaacaaaagggttttttcttttgcaaaaggatgaaagtattctaaatcagtttaaaatgcaatgtagttgtagtatctagaatcaacagtagagtcagaaatagtatttcttaataaaattgagactgagtgtagaatacttttgttttgttgctcgattgctct

SEQ ID NO: 211 - DNA, 105 bp, Turnip yellow mosaic virus
  source 1..105: mol_type = other DNA
gttctcgatctttaaaatcgttagctcgccagttagcgaggtctgtccccacacgacagataatcgggtgcaactcccgcccctcttccgagggtcatcggaacc

SEQ ID NO: 212 - DNA, 4851 bp, Tobacco mosaic virus
  source 1..4851: mol_type = other DNA
atggcatacacacagacagctaccacatcagctttgctggacactgtccgaggaaacaactccttggtcaatgatctagcaaagcgtcgtctttacgacacagcggttgaagagtttaacgctcgtgaccgcaggcccaaggtgaacttttcaaaagtaataagcgaggagcagacgcttattgctacccgggcgtatccagaattccaaattacattttataacacgcaaaatgccgtgcattcgcttgcaggtggattgcgatctttagaactggaatatctgatgatgcaaattccctacggatcattgacttatgacataggcgggaattttgcatcgcatctgttcaagggacgagcatatgtacactgctgcatgcccaacctggacgttcgagacatcatgcggcacgaaggccagaaagacagtattgaactatacctttctaggctagagagaggggggaaaacagtccccaacttccaaaaggaagcatttgacagatacgcagaaattcctgaagacgctgtctgtcacaatactttccagacaatgcgacatcagccgatgcagcaatcaggcagagtgtatgccattgcgctacacagcatatatgacataccagccgatgagttcggggcggcactcttgaggaaaaatgtccatacgtgctatgccgctttccacttctctgagaacctgcttcttgaagattcatacgtcaatttggacgaaatcaacgcgtgtttttcgcgcgatggagacaagttgaccttttcttttgcatcagagagtactcttaattattgtcatagttattctaatattcttaagtatgtgtgcaaaacttacttcccggcctctaatagagaggtttacatgaaggagtttttagtcaccagagttaatacctggttttgtaagttttctagaatagatacttttcttttgtacaaaggtgtggcccataaaagtgtagatagtgagcagttttatactgcaatggaagacgcatggcattacaaaaagactcttgcaatgtgcaacagcgagagaatcctccttgaggattcatcatcagtcaattactggtttcccaaaatgagggatatggtcatcgtaccattattcgacatttctttggagactagtaagaggacgcgcaaggaagtcttagtgtccaaggatttcgtgtttacagtgcttaaccacattcgaacataccaggcgaaagctcttacatacgcaaatgttttgtcctttgtcgaatcgattcgatcgagggtaatcattaacggtgtgacagcgaggtccgaatgggatgtggacaaatctttgttacaatccttgtccatgacgttttacctgcatactaagcttgccgttctaaaggatgacttactgattagcaagtttagtctcggttcgaaaacggtgtgccagcatgtgtgggatgagatttcgctggcgtttgggaacgcatttccctccgtgaaagagaggctcttgaacaggaaacttatcagagtggcaggcgacgcattagagatcagggtgcctgatctatatgtgaccttccacgacagattagtgactgagtacaaggcctctgtggacatgcctgcgcttgacattaggaagaagatggaagaaacggaagtgatgtacaatgcactttcagagttatcggtgttaagggagtctgacaaattcgatgttgatgttttttcccagatgtgccaatctttggaagttgacccaatgacggcagcgaaggttatagtcgcggtcatgagcaatgagagcggtctgactctcacatttgaacgacctactgaggcgaatgttgcgctagctttacaggatcaagagaaggcttcagaaggtgctttggtagttacctcaagagaagttgaagaaccgtccatgaagggttcgatggccagaggagagttacaattagctggtcttgctggagatcatccggagtcgtcctattctaagaacgaggagatagagtctttagagcagtttcatatggcaacggcagattcgttaattcgtaagcagatgagctcgattgtgtacacgggtccgattaaagttcagcaaatgaaaaactttatcgatagcctggtagcatcactatctgctgcggtgtcgaatctcgtcaagatcctcaaagatacagctgctattgaccttgaaacccgtcaaaagtttggagtcttggatgttgcatctaggaagtggttaatcaaaccaacggccaagagtcatgcatggggtgttgttgaaacccacgcgaggaagtatcatgtggcgcttttggaatatgatgagcagggtgtggtgacatgcgatgattggagaagagtagctgtcagctctgagtctgttgtttattccgacatggcgaaactcagaactctgcgcagactgcttcgaaacggagaaccgcatgtcagtagcgcaaaggttgttcttgtggacggagttccgggctgtgggaaaaccaaagaaattctttccagggttaattttgatgaagatctaattttagtacctgggaagcaagccgcggaaatgatcagaagacgtgcgaattcctcagggattattgtggccacgaaggacaacgttaaaaccgttgattctttcatgatgaattttgggaaaagcacacgctgtcagttcaagaggttattcattgatgaagggttgatgttgcatactggttgtgttaattttcttgtggcgatgtcattgtgcgaaattgcatatgtttacggagacacacagcagattccatacatcaatagagtttcaggattcccgtaccccgcccattttgccaaattggaagttgacgaggtggagacacgcagaactactctccgttgtccagccgatgtcacacattatctgaacaggagatatgagggctttgtcatgagcacttcttcggttaaaaagtctgtttcgcaggagatggtcggcggagccgccgtgatcaatccgatctcaaaacccttgcatggcaagatcctgacttttacccaatcggataaagaagctctgctttcaagagggtattcagatgttcacactgtgcatgaagtgcaaggcgagacatactctgatgtttcactagttaggttaacccctacaccagtctccatcattgcaggagacagcccacatgttttggtcgcattgtcaaggcacacctgttcgctcaagtactacactgttgttatggatcctttagttagtatcattagagatctagagaaacttagctcgtacttgttagatatgtataaggtcgatgcaggaacacaatagcaattacagattgactcggtgttcaaaggttccaatctttttgttgcagcgccaaagactggtgatatttctgatatgcagttttactatgataagtgtctcccaggcaacagcaccatgatgaataattttgatgctgttaccatgaggttgactgacatttcattgaatgtcaaagattgcatattggatatgtctaagtctgttgctgcgcctaaggatcaaatcaaaccactaatacctatggtacgaacggcggcagaaatgccacgccagactggactattggaaaatttagtggcgatgattaaaaggaactttaacgcacccgagttgtctggcatcattgatattgaaaatactgcatctttagttgtagataagttttttgatagttatttgcttaaagaaaaaagaaaaccaaataaaaatgtttctttgttcagtagagagtctctcaatagatggttagaaaagcaggaacaggtaacaataggccagctcgcagattttgattttgtagatttgccagcagttgatcagtacagacacatgattaaagcacaacccaagcaaaaattggacacttcaatccaaacggagtacccggctttgcagacgattgtgtaccattcaaaaaagatcaatgcaatatttggcccgttgtttagtgagcttactaggcaattactggacagtgttgattcgagcagatttttgtttttcacaagaaagacaccagcgcagattgaggatttcttcggagatctcgacagtcatgtgccgatggatgtcttggagctggatatatcaaaatacgacaaatctcagaatgaattccactgtgcagtagaatacgagatctggcgaagattgggttttgaagacttcttgggagaagtttggaaacaagggcatagaaagaccaccctcaaggattataccgcaggtataaaaacttgcatctggtatcaaagaaagagcggggacgtcacgacgttcattggaaacactgtgatcattgctgcatgtttggcctcgatgcttccgatggagaaaataatcaaaggagccttttgcggtgacgatagtctgctgtactttccaaagggttgtgagtttccggatgtgcaacactccgcgaatcttatgtggaattttgaagcaaaactgtttaaaaaacagtatggatacttttgcggaagatatgtaatacatcacgacagaggatgcattgtgtattacgatcccctaaagttgatctcgaaacttggtgctaaacacatcaaggattgggaacacttggaggagttcagaaggtctctttgtgatgttgctgtttcgttgaacaattgtgcgtattacacacagttggacgacgctgtatgggaggttcataagaccgcccctccaggttcgtttgtttataaaagtctggtgaagtatttgtctgataaagttctttttagaagtttgtttatagatggctctagttgttaa

SEQ ID NO: 213 - DNA, 4851 bp, Tomato mosaic virus
  source 1..4851: mol_type = other DNA
atggcatacacacaaacagccacatcgtccgctttgcttgagaccgtccgaggtaacaataccttggtcaacgatcttgcaaagcggcgtctatatgacacagcggtagatgaatttaatgctagggaccgcaggcctaaagtcaatttttccaaagtagtaagcgaagaacagacgcttattgcaaccaaagcctacccagaattccaaattacattctacaacacgcagaatgctgtgcattcccttgcaggcggtctccgatcattagaattggaatatctgatgatgcaaattccctacggatcattgacatatgatatcggaggtaattttgcatctcatctgttcaaagggcgagcatacgttcactgctgtatgccgaatctagatgtccgcgacataatgcggcacgagggccaaaaggacagtattgaactatacctttctaggctcgagaggggcaacaaacatgtcccaaacttccaaaaggaagctttcgacagatacgctgaaatgccaaacgaagtagtctgtcacgatactttccaaacgtgtaggcattctcaagaatgttacacgggaagagtgtatgctattgctttgcatagtatatacgatatacctgccgacgagttcggcgcggcactgctgagaaagaatgtacatgtatgttatgccgctttccacttttccgagaatttacttctcgaagattcacacgtcaacctcgatgagatcaatgcatgtttccaaagagatggagacaggttgactttttcctttgcatctgagagtactcttaattatagtcatagttattctaatattcttaagtatgtttgcaaaacttacttcccagcctctaatagagaggtttacatgaaggagtttttagtaactagagttaatacctggttttgtaaattttctagaatagatactttcttattgtacaaaggtgtagcgcataagggtgtagatagtgagcagttttacaaggctatggaagacgcatggcactacaaaaagactcttgcgatgtgcaacagtgaaagaatcttgttagaggattcttcatcagttaattactggtttccaaaaatgagggatatggtgatagttccactatttgacatatctctcgagactagtaaaagaacacgcaaagaggtcttagtttcaaaggactttgtttatacagtgttaaatcacattcgtacgtaccaggccaaagcgcttacttactccaacgtgttatctttcgtcgaatcaattcgttcgagagtgatcattaacggggttactgccaggtctgagtgggatgtcgataaatcattattacagtccttgtcgatgacgttcttcctacataccaagcttgccgttctgaaagacgatcttttgattagcaagtttgcacttggaccaaaaactgtctcacaacatgtgtgggatgagatttccctagctttcggcaatgctttcccatcgatcaaggaaagattgataaaccggaaactgatcaaaattacggagaatgcgttagagatcagggtgcccgatctttatgtcactttccatgataggttagtttctgagtacaaaatgtcagtggacatgccggtgctagacattaggaaaaagatggaagaaactgaggaaatgtacaatgcactgtccgaactgtctgtacttaaaaattcagacaagttcgatgttgatgttttttcccagatgtgccaatctttagaagttgatccaatgactgcagcaaaggtaatagtagcagttatgagcaacgagagtggtcttactctcacgtttgaacagcccaccgaagctaatgttgcgctagcattgcaagattctgaaaaggcttctgatggggcgttggtagttacctcaagagatgttgaggaaccgtccataaagggttcgatggcccgtggtgagttacaattggccggattatctggcgacgttcctgaatcttcatacactaggagcgaggagattgagtctctcgagcagtttcatatggcaacagctagttcgttaattcataagcagatgtgttcgatcgtgtacacgggccctcttaaagttcaacaaatgaaaaactttatagacagcctggtagcctcgctctctgctgcggtgtcgaatctagtgaagatcctaaaagatacagccgcgattgaccttgaaactcgtcaaaagttcggagttctggatgttgcttcgaaaaggtggctagttaaaccatccgcaaagaaccatgcatggggggttgttgagactcatgcgaggaaatatcacgtcgcattactggagcacgatgaatttggcattattacgtgcgataactggcgacgggtggctgtgagttctgagtcggtagtatattctgatatggctaaactcaggactctgagaagattgctcaaagatggagaaccacacgttagttcagcaaaggtggttttggtggatggcgttccagggtgcgggaagacaaaggaaattctttcgagagttaatttcgaagaagatctaattcttgtccctggtcgtcaagctgccgagatgatcagaagaagagctaatgcgtcgggcataatagtggctacaaaggataatgtgcgcaccgtcgattcatttttgatgaattacgggaaaggggcacgctgtcagttcaaaagattgttcatagacgaaggtttgatgctgcatactggttgtgtgaatttcttggttgaaatgtctctgtgcgatattgcatatgtttatggagacacccaacaaattccgtacatcaacagagtaactggtttcccgtaccctgcgcactttgcaaaattggaggtcgacgaagtcgaaacaagaagaactactcttcgctgtccggctgatgtcacacacttcctaaatcaaaggtatgaaggacacgtaatgtgcacgtcttctgaaaagaaatcagtttcccaggaaatggttagtggggctgcgtctatcaatcctgtgtccaagccgcttaaagggaaaattttgactttcacacagtctgacaaggaggcccttctctcaaggggctacgcagatgtccatactgtacatgaggtacaaggtgagacttatgcagacgtatcgttagttcgactaacacctacgcctgtatctatcatcgcaagagacagtccgcatgttctggtctcgttgtcaagacacacaaaatccctaaagtactacaccgttgtgatggatcctttagttagtatcattagagatttagaacgggttagtagttacttattagacatgtacaaagtagatgcaggtactcaatagcaattacaggtcgactctgtgtttaaaaatttcaatctttttgtagcagctccaaagactggagatatatctgatatgcaattttactatgataagtgtcttcctgggaacagcacgttgttgaacaactacgacgctgttaccatgaaattgactgacatttctctgaatgtcaaagattgcatattagatatgtctaagtctgtagctgctccgaaagatgtcaaaccaactttaataccgatggtacgaacggcggcagaaatgcctcgccagactggactgttggaaaatctagttgcgatgattaaaagaaattttaattcaccagagttgtccggagtagttgatattgaaaatactgcatctttagtggtagataagttttttgatagttatttacttaaggaaaaaagaaaaccaaacaaaaatttttcactgtttagtagagagtctctcaataggtggatagcaaagcaagaacaagtcacaattggtcagttggccgattttgattttgtggatcttccagccgttgatcagtacaggcatatgattaaagcgcaaccgaagcagaaactggatctgtcaattcagacagaatatccagcgttgcaaacgattgtgtatcattcaaagaaaatcaacgcaatatttggtcctcttttcagtgagcttacaaggcaattacttgacagtattgactcaagcagattcttgttctttacgagaaagacaccggctcagatcgaagatttcttcggagatctagacagtcatgtcccaatggacgtacttgagttggatgtttcgaagtatgataagtctcaaaacgagtttcattgtgctgttgagtacgaaatctggaggagactgggtctggaggatttcttggcagaagtgtggaaacaagggcatagaaaaaccaccctgaaagattacactgctggtataaaaacgtgtttatggtaccagagaaagagtggtgatgttacaacttttatcggtaataccgtcatcattgcttcgtgtcttgcatcaatgctcccgatggaaaaattgataaaaggagccttctgcggagatgacagtttgttgtactttcctaagggttgtgagtatcccgatatacaacaagctgccaatctaatgtggaattttgaggccaaactgttcaagaagcaatatgggtacttctgcgggaggtacgtgattcatcacgatagaggttgcatagtatactacgaccctttgaagctgatttcgaaacttggtgctaaacacatcaaggattgggatcatttggaggagttcagaagatccctctgtgatgttgctgagtcgttgaacaattgcgcgtattacacacaattggacgacgctgttggggaggttcataaaaccgccccacctggttcgtttgtttataagagtttagttaagtatttgtcagataaagttttgtttagaagtttatttcttgatggctctagttgttaa

SEQ ID NO: 214 - DNA, 4806 bp, Turnip vein-clearing virus
  source 1..4806: mol_type = other DNA
atggcacaatttcaacaaacaattgacatgcaaactctccaagccgctgcgggacgcaacagcttggtgaatgatttggcatctcgtcgcgtttacgataatgcagtcgaggagctgaatgctcgttccagacgtcccaaggttcatttctccaaggcagtgtctacggaacagacactgattgcaacaaacgcatatccggagttcgagatttcctttactcatacgcaatccgctgtgcactccttggccggaggccttcggtcacttgagttggagtatctcatgatgcaagttccgttcggttctctgacgtacgacatcggcggtaacttttccgcgcaccttttcaaagggcgcgattacgttcactgctgcatgcctaatctggatgtacgtgacattgctcgccatgaaggacacaaggaagctatttacagttatgtgaatcgtttgaaaaggcagcagcgtcctgtgcctgaataccagagggcagctttcaacaactacgctgagaacccgcacttcgtccattgcgacaaacctttccaacagtgtgaattgacgacagcgtatggcactgacacctacgctgtagctctccatagcatttatgatatccctgttgaggagttcggttctgcgctactcaggaagaatgtgaaaacttgtttcgcggcctttcatttccatgagaatatgcttctagattgtgatacagtcacactcgatgagattggagctacttttcagaagtccggtgataatttaagttttttctttcataatgagagcactctcaattacacccacagttttagtaatataattaagtatgtgtgtaaaacgttctttcctgctagtcaacggtttgtgtatcataaggagtttttagttactagagtcaacacttggtactgtaagtttacgagagtggatacttttactcttttccgtggtgtgtaccataataatgtggattgcgaagagttttacaaggctatggacgatgcgtggcactacaaaaagacgttagcaatgcttaatgccgagaggaccatcttcaaggataacgctgcgttaaacttttggttcccgaaagtgagagacatggttatcgtccctctctttgacgcttctatcacaactggtaggatgtctaggagagagattatggtgaacaaggatttcgtttatacggtcctaaatcacataaaaacgtatcaagctaaggctttaacttacgcaaatgttctgtcctttgtggagtctattaggtctagagtgataattaacggtgtcactgccaggtctgaatgggacacagacaaggcaattctaggtccattagcaatgacatttttccttataacaaagttgggtcatgtgcaggatgaaataatcctgaaaaagttccagaagttcgacagaaccaccaatgagctgatttggacaagtctctgcgatgccctgatgggggttattccctcggtcaaggagacgcttgtgcgcggtggttttgtgaaagtagcagaacaagccttagagataaaggttcccgagctatactgtacctttgccgacagattggtactacagtacaagaaggcggaggagttccaatcgtgtgatctttccaaacctctagaagagtcagagaagtactacaacgcattatccgagctatcagtgcttgagaatctcgactcttttgacttagaggcgtttaagactttatgtcagcagaagaatgtggacccggatatggcagcaaaggtggtcgtagcaatcatgaagtcagaattgacgttgcctttcaagaaacctacagaagaggaaatctcggagtcgctaaaaccaggagaggggtcgtgtgcagagcataaggaagtgttgagcttacaaaatgatgctccgttcccgtgtgtgaaaaatctagttgaaggttccgtgccggcgtatggaatgtgtcctaagggtggtggtttcgacaaattggatgtggacattgctgatttccatctcaagagtgtagatgcagttaaaaagggaactatgatgtctgcggtgtacacagggtctatcaaagttcaacaaatgaagaactacatagattacttaagtgcgtcgctggcagctacagtctcaaacctctgcaaggtgcttagagatgttcacggcgttgacccagagtcacaggagaaatctggagtgtgggatgttaggagaggacgttggttacttaaacctaatgcgaaaagtcacgcgtggggtgtggcagaagacgccaaccacaagttggttattgtgttactcaactgggatgacggaaagccggtttgtgatgagacatggttcagggtggcggtgtcaagcgattccttgatatattcggatatgggaaaacttaagacgctcacgtcttgcagtccaaatggtgagccaccggagcctaacgccaaagtaattttggtcgatggtgttcccggttgtggaaaaacgaaggagattatcgaaaaggtaaacttctctgaagacttgattttagtccctgggaaggaagcttctaagatgatcatccggagggccaaccaagctggtgtgataagagcggataaggacaatgttagaacggtggattccttcttgatgcatccttctagaagggtgtttaagaggttgtttatcgatgaaggactaatgctgcatacaggttgtgtaaatttcctactgctgctatctcaatgtgacgtcgcatatgtgtatggggacacaaagcaaattccgttcatttgcagagtcgcgaactttccgtatccagcgcattttgcaaaactcgtcgctgatgagaaggaggttagaagagttacgctcaggtgcccggctgatgttacgtatttccttaacaagaagtatgacggggcggtgatgtgtaccagcgcggtagagagatccgtgaaggcagaagtggtgagaggaaagggtgcattgaacccaataaccttaccgttggagggtaaaattttgaccttcacacaagctgacaagttcgagttactggagaagggttacaaggatgtgaacactgtgcacgaggtgcaaggggagacgtacgagaagactgctattgtgcgcttgacatcaactccgttagagatcatatcgagtgcgtcacctcatgttttggtggcgctgacaagacacacaacgtgttgtaaatattacaccgttgtgttggacccgatggtgaatgtgatttcagaaatggagaagttgtccaatttccttcttgacatgtatagagttgaagcgggggtccaatagcaattacagatcgatgcagtattcagggacagcaacttgtttgttcagacgcccaagtcaggagattggcgagatatgcaattttactatgacgctcttcttcccggaaacagtactattctcaatgaatttgatgctgttacgatgaatttgagggatatttccttaaacgtcaaagattgcagaatcgacttctccaaatccgtgcaacttcctaaagaacaacctattttcctcaagcctaaaataagaactgcggcagaaatgccgagaactgcaggtttgctggaaaatttggttgcaatgatcaaaagaaacatgaatgcgccggatttgacagggacaattgacattgaggatactgcatctctggtggttgaaaagttttgggattcgtatgttgacaaggaatttagtggaacgaacgaaatgaccatgacaagggaaagtttttctagatggctttcgaaacaagagtcatctacagttggtcagttagcggactttaactttgtggatttgccggcagtagatgagtacaagcatatgatcaagagtcaaccaaagcaaaagttagacttgagtattcaagacgaatatcctgcattgcagacgatagtctaccattcgaaaaagatcaatgcgattttcggtccaatgttttcagaacttacgaggatgttactcgaaaggattgactcttcgaagtttctgttctacaccagaaagacacctgcacaaatagaggacttcttttctgacctagactcaacccaggcgatggaaattctggaactcgacatttcgaagtacgataagtcacaaaacgagttccattgtgctgtagagtacaagatctgggaaaagttaggaattgatgagtggctagctgaggtatggaaacaaggacacagaaaaacgaccttgaaagattatacggccggagtcaaaacatgtctttggtatcaaaggaaaagtggtgatgtgacaacctttattggtaataccatcatcattgcagcctgtttgagctcaatgatccccatggacaaagtgataaaggcagctttttgtggagacgatagcctgatttacattcctaaaggtttagacttgcctgatattcaggcgggcgcgaacctcatgtggaacttcgaggccaaactcttcaggaagaagtatggttacttctgtggtcgttatgttattcaccatgatagaggagccattgtgtattacgatccgcttaaactaatatctaagttaggttgtaaacatattagagatgttgttcacttagaagagttacgcgagtctttgtgtgatgtagctagtaacttaaataattgtgcgtatttttcacagttagatgaggccgttgccgaggttcataagaccgcggtaggcggttcgtttgctttttgtagtataattaagtatttgtcagataagagattgtttagagatttgttctttgtttga

SEQ ID NO: 215 - DNA, 4839 bp, Pepper mild mottle virus
  source 1..4839: mol_type = other DNA
atggcttacacacaacaagctaccaacgccgcattagcaagtactctccgagggaataaccccttggtgaacgatcttgctaatcggagactgtacgaatcagcggtcgaacaatgcaatgcacatgaccgcaggcccaaggttaattttttaaggtcgataagcgaagagcagacgcttatcgcaactaaggcctaccctgagttccaaatcacgttctacaacacgcagaacgctgtgcacagtctcgcaggtggacttcggtctttggaactagaatacttgatgatgcagatcccctacggttcaacgacatatgatatcgggggaaattttgctgctcacatgtttaaaggtcgtgactacgttcattgctgcatgcctaacatggacttacgtgacgtcatgcgtcacaatgctcaaaaggatagcattgaactgtacctttcaaagcttgcgcaaaagaaaaaggtaataccgccatatcaaaagccatgctttgataaatacacggacgatccgcaatcagtagtgtgctcgaaaccttttcagcactgcgaaggcgtttcgcactgcacggataaagtatacgctgtcgctttgcacagtttatacgacattccagcagatgaatttggggcagcacttctgaggagaaatgttcatgtctgctatgctgccttccacttttctgagaatcttcttttagaagattcgtatgtcagtcttgacgacataggcgctttcttctcgagagagggcgatatgttgaacttttcttttgtagcagagagtactttaaattatactcattcctatagtaatgtgcttaagtatgtgtgtaagacttacttccccgcttctagtagagaagtgtacatgaaggagtttttggtaactagggtaaatacttggttttgtaagttttcaaggttagatacctttgtactatatagaggtgtataccacagaggtgtagacaaggagcaattttacagtgcaatggaagatgcttggcattacaaaaagactttggcgatgatgaatagcgaaagaatcctcttagaggattcatcgtctgttaattattggtttccaaagatgaaagatatggtgatagtacctttgttcgacgtatctttacagaacgaggggaaaaggttagcaagaaaggaggtcatggtcagcaaggacttcgtttatactgtgcttaatcatattcgcacataccagtcgaaagcgcttacttacgccaatgtattatcgttcgttgagtcgataagatcaagagtgataatcaatggggtgactgcgcgctcagagtgggatgtggataaggctttgttgcagtccctgtcaatgacttttttcttgcagaccaaattggccatgctcaaggatgacctcgtggttcagaaattccaagtgcattccaaatcgctcactgaatatgtctgggatgagattactgctgcttttcacaattgttttcctacaatcaaggagaggttgattaacaagaaactcataactgtttcggaaaaggctcttgaaattaaagtacctgatttgtatgtaactttccacgatagattggttaaggagtacaagtcttcggtggaaatgccggtactggacgttaaaaagagcttggaagaagcagaagtgatgtacaatgctttgtcagaaatctcaattcttaaagacagtgacaagtttgatgttgatgttttttcccggatgtgtaatacattaggcgtagatccattggtggcagcaaaggtaatggtagctgtggtttcaaatgagagtggtttgaccttaacgtttgagaggcctaccgaagcaaatgtcgcacttgcattgcaaccgacaattacatcaaaggaggaaggttcgttgaagattgtgtcgtcagacgtaggtgagtcctcaatcaaggaagtggttcgaaaatcagagatttctatgcttggtctaacaggcaacacagtgtccgatgagttccaaagaagtacagaaatcgagtcgttgcagcagttccatatggtatccacagagacgattatccgtaaacagatgcatgcgatggtgtatactggtccgctaaaagttcaacaatgcaagaactatttagacagcctggtagcctcgctctctgctgcggtatcaaacctgaagaagataatcaaagacacagctgctatagatctcgagactaaggaaaaatttggagtctacgacgtgtgccttaagaaatggttggtgaaacctctatcaaaaggacatgcttggggtgtggtgatggactcagactataagtgctttgttgcgcttctcacatacgatggcgagaacattgtgtgcggagagacatggcgtagagtcgcagtgagctccgaatctttggtgtattcagatatggggaagataagagctatacgctctgtgcttaaagacggtgaaccccatataagcagtgcaaaggttacacttgttgatggtgttcctggttgcggaaagacaaaggagattctttcgagggtcaactttgacgaagatctagttctggtaccaggaaaacaggctgctgaaatgataagaagaagggcaaacagttctggtttaatcgtggcgaccaaggagaatgtaaggacggtagactctttcttaatgaattacggtcgaggtccgtgccaatacaaaaggctgtttctggatgaaggtctaatgttacaccctggttgtgttaattttctggttggcatgtctctatgctccgaggcttttgtttatggagacacccagcagattccttacatcaacagagttgcaacttttccctatcctaagcatttgagtcaactcgaggtcgatgctgttgaaactcgcagaacaacgttgcggtgtccagctgatatcaccttcttcttgaatcagaagtacgaagggcaagttatgtgcacatcaagtgttacacgctcggtgtcacacgaggtcatccaaggtgcagcggtaatgaatccagtgtctaaaccacttaaagggaaggtgattacattcactcagtcagacaagtcattgctgctctcgaggggttacgaagatgtgcataccgttcatgaggtgcaaggggaaacgtttgaagacgtctcactagtgaggctgacgccaacacccgtgggaataatttcaaagcagagtccgcacctgttggtctcattgtctaggcatacaaggtcgatcaaatattacacagttgtgctagatgcagtcgtttcagtgcttagagatctggagtgtgtgagtagttacctgttagatatgtacaaagttgatgtgtcgactcaatagcaattacagatagaatcggtgtacaaaggtgttaaccttttcgtcgcagcaccaaaaacaggagatgtttctgacatgcaatattattacgacaagtgtttgccgggaaacagtactatactcaatgagtatgatgctgtaactatgcaaatacgagagaatagtttgaatgtcaaggattgtgtgttggatatgtcgaaatcggtgcctcttccgagagaatctgagacgacattgaaacctgtgatcaggactgctgctgaaaaacctcgaaaacctggattgttggaaaatttggtcgcgatgatcaaaagaaatttcaactctcccgaattagtaggggttgttgacatcgaagacaccgcttctctagtagtagataagttttttgatgcatacttaattaaagaaaagaaaaaaccaaaaaatatacctctgctttcaagggcgagtttggaaagatggatcgaaaagcaagagaagtcaacaattggccagttggctgattttgactttattgatttaccagccgttgatcaatacaggcacatgatcaagcagcagccgaaacagcgtttggatcttagtattcaaactgaatacccggctttgcaaactattgtgtatcatagcaagaaaatcaatgcgctttttggtcctgtattttcagaattaacaagacagctgctagagacaattgacagttcaagattcatgttttatacaaggaaaacgcctacacagatcgaagaatttttctcagatctggactctaatgttcctatggacatattagagctagacatttccaagtatgacaaatcacagaacgaatttcattgtgcagtcgagtatgagatttggaaaaggttaggcttagacgatttcttggctgaagtttggaaacacgggcatcggaagacaacgttgaaagactacacagccggaataaaaacgtgtttgtggtaccagaggaaaagcggtgatgtcaccacattcattggaaacacgatcattattgctgcatgtctgtcctctatgctaccgatggagagattgattaaaggtgccttttgtggtgatgatagtatattatactttccaaagggcactgatttccccgatattcaacagggcgcaaaccttctctggaattttgaagccaagttgtttaggaagagatatggttacttttgcggtaggtacataattcaccatgacagaggctgtattgtatattatgaccctctaaaattgatctcgaaactcggtgcaaaacacatcaagaatagagaacatttagaggaatttaggacctctctttgtgatgttgctgggtcgttgaacaattgtgcgtactatacacatttgaacgacgctgtcggtgaggttattaagaccgcacctcttggttcgtttgtttatagagcattagttaagtacttgtgtgataaaaggttatttcaaacattgtttttggagtaa

SEQ ID NO: 216 - DNA, 2391 bp, Turnip crinkle virus
  source 1..2391: mol_type = other DNA
atgcctcttctacacacactcaacacagcgctcgcagtgggactcctaggagccaggtactaccctgaggttcaaaccttcttggggctgcctgactacgtgggtcacatgaagaatgtagtacggtctgttttccagggatctgggctagtagtagtgtcctccgacacagtcggtgtcagggggacgtatagtaatagaggtcagataggtagtagtctcgggtgtatactagccgttccggatagcggggcggatatagaaatagacttagataggttggtaggaacggaagaggaagccacatcctgtttggtggaggcggtaggtagtaccgcagatgtccccaggaggagagttcgtcaaaaggggcggtttgccatgcatgccgtcaacgcagcaaagctgcacttttgtggcgtcccaaaacccactgaagcgaatcgactagcggtctcaaaatggcttgtccaatactgcaaagagagacatgtcgtagacagccacatcagaacgatagtcaatacggctcttcctagagtgttcacgcctgacgcggaagacattcaggtcgtgctggatttgcacagtgtaagagcacacgaccaccgcaacgccctagccgaagcaggcaaagtgcggaagtggtgggtcaatctcgcgatgcatcccatgactgggaggtcgtggtccagggcttggaggcgattatgccgactgcctgacgaccaggcgatctcttttgtccgctaggggtgcttgcgggagctggtcgggagggagactcaaatctccaggggtgaaaacccggccatgcgcgtgttcccgttagcaaatcccccgaaggttcgacgcatcttccatatctgtggaatgggcaatggtttagactttggagtccacaacaactcactcaacaatttgagaagagggttgatggaaagagtcttttacgttgaagatgcgcagaagcaattgaaaccagccccccaaccgatcccagggattttcgggaagttgagtgggattcggagacgattggtcaggttggccggaaatcatacccctgtgcctcgggagaaatacccgtcgttctacaagggcaggagggccaccatataccaaaaggctttggattctctacatgacagaccggtatcccggaaggacgcagaactcaaaacattcgtgaaggcagaaaagatcaatttcacggctaagaaagacccggctccacgggtcatccagccgagggacccacgatataatattgaggttgggaaatacttgaaaccgtacgagcaccatttatatcgggcaattgacgctatgtggggtgggcccactgtgctgaaaggatacgatgtgggggagcttggaaacattatgagtaacacctgggataaattccggaaaacgtgtgcgataggatttgacatgaagagattcgaccagcacgtatccgtggacgccctacgatgggaacacagtgtatacaacgcgggctttaactgtcccgagttggcacagctgctaacttggcagttgaccaacaagggggttgggagagcctccgatggctttatcaaataccaagttgatggttgtcgcatgtccggagatgttaacacagccttgggcaactgcctactggcttgctctatcaccaagtacttaatgaagggaatcaaatgcaaattaatcaacaatggagacgattgtgtgctgttcttcgaagctgatgaagtcgacagggtgcgcgaaaggctgcatcattggatcgactttgggtttcaatgcatagcggaagaaccacaatacgaattggagaaagttgaattttgccagatgtcccctattttcgatggtgaagggtgggtcatggtcagaaacccccgtgtgagcctctccaaggacagctacagcaccacacaatgggcgaatgagaaagatgcagccagatggttggctgccatcggagagtgtggcttggctattgcaggtggcgtaccagtgttacaatcatattattcttgcctgaagaggaattttggacccctggccggggactacaagaagaagatgcaagatgtttcctttgatagtggattctacaggttatccaagaacgggatgaggggcagcaaagacgtgtcccaagatgctaggttcagcttttaccgggggttcggctacactccagacgagcaggaagcgcttgaggagtactacgacaacctcgaactgctctgtgagtgggaccccacgggatataaagaagaacttagtgatagatggatcctgaacgaattccctacaactctctaagcgacagcgacgcaacaggaaaacggaagaaaggcggagagaaaagtgcgaagaagagattgg

SEQ ID NO: 217 - DNA, 816 bp, Turnip crinkle virus
  source 1..816: mol_type = other DNA
atgcctcttctacacacactcaacacagcgctcgcagtgggactcctaggagccaggtactaccctgaggttcaaaccttcttggggctgcctgactacgtgggtcacatgaagaatgtagtacggtctgttttccagggatctgggctagtagtagtgtcctccgacacagtcggtgtcagggggacgtatagtaatagaggtcagataggtagtagtctcgggtgtatactagccgttccggatagcggggcggatatagaaatagacttagataggttggtaggaacggaagaggaagccacatcctgtttggtggaggcggtaggtagtaccgcagatgtccccaggaggagagttcgtcaaaaggggcggtttgccatgcatgccgtcaacgcagcaaagctgcacttttgtggcgtcccaaaacccactgaagcgaatcgactagcggtctcaaaatggcttgtccaatactgcaaagagagacatgtcgtagacagccacatcagaacgatagtcaatacggctcttcctagagtgttcacgcctgacgcggaagacattcaggtcgtgctggatttgcacagtgtaagagcacacgaccaccgcaacgccctagccgaagcaggcaaagtgcggaagtggtgggtcaatctcgcgatgcatcccatgactgggaggtcgtggtccagggcttggaggcgattatgccgactgcctgacgaccaggcgatctcttttgtccgctaggggtgcttgcgggagctggtcgggagggagactcaaatctccaggggtgaaaacccggccatg

SEQ ID NO: 218 - DNA, 2457 bp, Tomato bushy stunt virus
  source 1..2457: mol_type = other DNA
atggagaccatcaagagaatgatttggcctaagaaagagatttttgtgggtgatttcgcaaccggagtgaataggacagttccggtgaacatctttcaattggtgtgtcgtgtggttctgagatacatgaggacagggaaaatagagtgtgattctgacagcatgactaagtttatagttgaattactcaaaactgattgtgctgccaaatgggaatggttcatgaagagacggcagaggggtgattacattgtccctctatctatagcctccataccaatcataccgctgttgagttatgccactagggtacgcgcagtctcagtcaaggcttttggcaatgaactatcgttcaatgtcagggtgcctagaccatctgtacctaagaaaggattgctcctcagactggcggcaggtctagcgttagctcctatatgcgcgctggccgtgtacgctaccctacctagggaaaaactgtcggtatttaagctgagaactgaggcacgagcacacatggaggatgagagagaagcgacagattgtctggtggttgagccggcaagggaacttaagggtaaagatggtgaggatctcctcactggtagtagattgactaaggtgatcgcgtccactgggcgccctcgtcgaagaccttatgcggcaaagatcgcacaggtggcgagagcaaaggtgggttaccttaagaacagtccagagaatagactaatctaccagagggtgatgatcgagatcatggacaaagactgcgtcaggtatgttgacagggatgtcatattgcctttggctattggatgctgttttgtctatccggatggagtggaggagtcggcggcactatggggctcacaggagtccctgggtgtcaaatagggaggcctagtacgtctacctggggttgtaacacagatcaatcgagatatcccatctgatgtgttacttcctcaggaggtgctagaggttcgtacaggacctcccaatgctaaggaccgtaatatatttatggttgcaggttgcccatcacaggcacggttcttagtacataatcactgcctgaaaaaccttaaaaggggtcttgtggagagagtcttctgcgtagagagaaacgggaagctcgctcgcactccacaacctaccaaaggagcctttggacgtctttccccgttcaggaaagcggtttgtgagaaggttggggtagcccaccgacttgggtatgatgggtttctgtcatactacagcggtgcgaaactccgtacttacacacgagccgtggagagtctgcatatcacacctgtctccgagagggatagtcacttgactaccttcgtaaaagcagagaagatatcgacgtctaagggtgacccagcacctcgggtgattcagcctcgaaacccgaggtacaatgtggaacttggaagatatctacggcatatggaatccaagctgatgaaagctgttgatggcgtgttcggagagacgacatgcatcaaaggatacacagctgatgaggtaggtgcaattttccgggctaaatgggacaggtttgataagcctgtcgccatagggctcgatgcatctaggtttgatcaacactgttccgttgaagcattgcaatatgagcatagcttctacagggccatgtaccctggcaacaagctcttgggcaagttgttggaatggcagctccataataaaggtaaaggttatgttccagatggaactataacctatcgcaaggagggctgtcgcatgagtggggatataaacacctcgttgggcaactatctactgatgtgtgcaatggtacatgggtacatgcgtcatctggggattaatgagtttagtctggcaaactgtggggatgattgcgtcctaattgtcgaacgcaggaatcttaagcagatacagagaactttaccggagtatttcctcaatctgggatatactatgaaggtggagcaacctgtatttcaactggaagaggttgaattttgccaggcacacccagtacagtttcaaggcggttggaagatggttcgaaacgtccgtactgctatgagcaaggatgtgcactgtgtcaacaatatacgcgatttggcgacgaggagagcttggagtaatgctcaacatcatgggggtctagcgcttagtgctggtattccagttgtggagacgttttactctaggtttaagctttatgatgtacctcgtaaacatcaacgtattgacacggtcacaaatgtgcacaagtggcgtggatccggtgggagttatgttgtgacccctgaatctagggctagcttttgggctgcctttggactcacgggggatgagcaactggctctggaggaccgtctggaaagatgggagatggatctgtttggagaggagggtgttgacgctcatgagcccagcatcctcgactccgccgtagcttga

SEQ ID NO: 219 - DNA, 891 bp, Tomato bushy stunt virus
  source 1..891: mol_type = other DNA
atggagaccatcaagagaatgatttggcctaagaaagagatttttgtgggtgatttcgcaaccggagtgaataggacagttccggtgaacatctttcaattggtgtgtcgtgtggttctgagatacatgaggacagggaaaatagagtgtgattctgacagcatgactaagtttatagttgaattactcaaaactgattgtgctgccaaatgggaatggttcatgaagagacggcagaggggtgattacattgtccctctatctatagcctccataccaatcataccgctgttgagttatgccactagggtacgcgcagtctcagtcaaggcttttggcaatgaactatcgttcaatgtcagggtgcctagaccatctgtacctaagaaaggattgctcctcagactggcggcaggtctagcgttagctcctatatgcgcgctggccgtgtacgctaccctacctagggaaaaactgtcggtatttaagctgagaactgaggcacgagcacacatggaggatgagagagaagcgacagattgtctggtggttgagccggcaagggaacttaagggtaaagatggtgaggatctcctcactggtagtagattgactaaggtgatcgcgtccactgggcgccctcgtcgaagaccttatgcggcaaagatcgcacaggtggcgagagcaaaggtgggttaccttaagaacagtccagagaatagactaatctaccagagggtgatgatcgagatcatggacaaagactgcgtcaggtatgttgacagggatgtcatattgcctttggctattggatgctgttttgtctatccggatggagtggaggagtcggcggcactatggggctcacaggagtccctgggtgtcaaatag

SEQ ID NO: 220 - DNA, 8640 bp, Tomato spotted wilt orthotospovirus
  source 1..8640: mol_type = other DNA
atgaacatccagaaaatacaaaaattaatagaaaatggaaccactttattgttatctattgaggattgtgtaggttctaaccatgatctggctttggatttacataagagaaatagtgatgagattccagaagatgtgattattaataataatgcaaaaaactatgagacgatgagagaattaattgtcaaaatcactgctgatggagaagggctaaacaaagggatggcaactgtggatgttaagaagctaggtgagatggtctctctgtttgagcaaaaatacttagaaacagagttagcaaggcatgatattttcggagagctgatctccagacacctaagaataaaacccaaacaaagaagcgaggtggagatagagcatgcactcagagaatatctggatgatctcaacaaaaagtcctgtgttaacaagctttctgatgatgagtttgagagaataaacaaagaatatgtggcaactaacgccacccctgataactatgtaatatataaagaatcaaaaaacagtgaactctgtttaatcatttatgattggaaaatatctgttgatgccaggactgaaaccaaaacaatggaaaaatactacaaaaatatctggaaatctttcaaagatataaaagtgaatggaaagccattcctagaagatcaccctgttttcgtttctattgttatattgaaacctattgctggaatgccaatcactgttactagcagtagggtattgggaaaatttgaagactctccatcagcattgcatggagaaagagtaaagcatgctagaaatgccaaactgctaaatatttcttatgttggaaaaatcgtaggaaccacgcccacagtggtgagaaactattatgcaaacactcagaaaatcaaatctgaagtcagaggaatcttaggtgatgattttggatccaaagatgtgttttttagtcactggactagcaaatacaaagagagaaatcctactgaaatagcctattctgaagatattgaaagaataattaactcacttgttacagaagaaatccctaaggaagagataatacattttttgtttggaaatttctgtttccacattgaaacgatgaatgaccagcatattgctgacaaatttaaagggtaccaaaactcttgtattaatttaaaaatagagccaaaagctgatttagctgatttgaaagaccacttgatccaaaaacagcaaatatgggaatctttgtatgggaaacaccttgagaagatcatgcttagaattagagaaaaaaagaaaaaagagaaagaaatacctgacataactacagcttttaaccagaatgccacagaatatgaagaaaagtatcctaactgttttacaaacgatctttctgaaactaaaactaacttttccatgacttggtccccaagttttgaaaaaattgaattgggctcagaagtagattacaataacgcaatcataaacaaatttcgggaaagcttcaaaagttcttcaagaattatttacaatagcccatatagtagcataaataaccaaacaaacaaagcaagagatataacaaacttggttagactgtgtttaacagagttaagttgtgatacaacaaaaatggaaaaacaggaacttgaggatgaaatagatataaacactgggagcattaaagttgagagaacaaaaaaatctaaagaatggagtaagcagggttcatgtttgaccaggaacaaaaatgaattttgcatgaaagagacaggcaaggagaacaaaactacctattttaaaggtttagcagtaatgaatataggaatgagctctaagaaaagaattctaaaaaaagaagaaataaaagaaaggatttctaaaggcctggaatatgatacctcagaaaggcaggctgacccaaatgatgattattcaagtatagacatgtcttctctgactcataggaaaaaactaattaggcacgacaatgaggacagcttaagctggtgtgaaagaattaaagattctttgtttattcttcataatggtgatataagagaggaaggcaagatcacatctgtttacaataattatgctaaaaatcccgaatgcttgtacattcaagattcagtattgaaagctgaactggagacttgtaaaaaaataaacaaattatgcaatgacctagccatttaccattactctgaagacatgatgcaattctccaaaggtttgatggtggcagacaggtatatgactaaagaaagtttcaagatactaactacagcaaatactagcatgttgctactggcatttaaaggagatggaatgaacaccggaggatcgggagttccttacatagcattgcacatagtggatgaagacatgtcagatcaatttaacatatgttatactaaagaaatttatagctatttccgaagtggtagtaattacatttatataatgagaccgcagagactcaaccaggtgaggctgctgagccttttcaaaacgcctagcaaagttcctgtatgttttgcacaattttcaaagaaagctaacgaaatggaaaaatggctgaaaaacaaagatatagaaaaagtgaatgtcttttctatgacaatgactgtaaaacagatattaataaatattgtattctcgtctgtcatgataggtactgtgacaaagctcagcaggatgggaatttttgatttcatgcggtatgctgggtttttgccactgtctgattattctaatataaaagaatacattagagataaatttgaccctgatataactaacgtggcagatatatattttgttaatggaatcaaaaaactattgttcagaatggaagatctcaatttaagcacaaatgccaagcctgttgtcgtagaccacgaaaacgatattataggaggtataacaaacttgaatataaaatgtccaataacaggatcgactttactaacactagaggatttgtacaataatgtttatttggctatttatatgatgcctaaatcattgcacaatcatgttcacaatctaacaagtttgttaaatgtccctgctgagtgggagctaaagttcagaaaagaattaggtttcaacatatttgaagacatataccctaagaaagcaatgtttgacgacaaagacctattctctataaatggagctctgaacgtgaaagcattatccgattactatctagggaatatagacaatgttggtttgatgagatcagaaatagaaaataaagaagatttcctgagcccgtgttacaagatatctactttaaaatcttcaaaaaagtgctcacaatcaaacattataagcactgatgagataatagagtgtctccagaacgcaaagattcaagatatagaaaactggaaagggaataatttggctattataaaagggcttataagaacttacaatgaggaaagaaatcgattagtggaattctttgaagataattgtgtcaattcgttgtatcttgtagaaaagcttaaagagataattaatagtggattgataactgcagggaaatctgtaacatccaaattcataagaaataaccatccattaacagtagaaacatatctcaaaacaaaactatattatagaaataatgtaacagttttaaagtctaaaaaagtgtcagaggagctttatgaccttgtaaaacagtttcataacatgatggaaatagatctagattctgttatgaaccttggtaaaggcacagaagggaagaaacacacattcttgcagatgcttgaatttgtcatgtccaaggctaaaaatgtcacagggtctgtagattttttagtttctgtttttgaaaaaatgcagagaactaaaacagacagagaaatatacttgatgagcatgaaagtgaaaatgatgctttactttatagagcacacattcaaacatgtagcacagagtgatccatcagaagctatctctataagtggagacaacaaaataagggcactttctacattatctttggacacaatcacatcttacaatgatattttgaacaaaaattcaaagaagtcaagattggctttcttatctgccgatcagtcgaaatggtcagcatcagaccttacctataaatatgttttagctatcatattaaatccaattttaactactggtgaagccagcttgatgatagaatgcattttaatgtatgttaaattgaaaaaggtttgtataccaacggatatttttttgaacctaagaaaagctcaaggaacttttgggcaaaatgaaactgccataggacttttgactaaaggtttgacgacaaacacatacccggttagcatgaactggttgcaaggcaatttaaattatctgtcgtctgtttatcattcttgtgcaatgaaagcttatcacaagactctagaatgttacaaagactgcgatttccaaactagatggattgtgcactctgatgacaatgcgacatcattgatagccagtggagaggtcgataaaatgctaacagatttttcaagctcatctctgccagaaatgttgtttagaagcattgaagctcatttcaaaagcttttgcataactttgaaccctaaaaagagttatgcttcttcatcagaagtagagtttatatctgaaagaattgtaaatggagcaattattcctctctattgcagacatttagcaaactgttgcacagaatcttcacatataagttattttgatgatttgatgtcactcagtatacatgttacaatgcttttgaggaaaggctgtcccaatgaagtaataccttttgcttatggggctgtgcaagtacaagcattaagcatctattcaatgcttcctggtgaagtgaatgatagcattaggatttttaaaaaacttggagtaagtttaaaatcaaacgagattcccacaaacatggggggctggttaacttctcctatagagccattgtctatattaggtccatcatcaaatgatcaaattatctattacaatgtgataagagattttttgaacaaaaaaagtttagaagaggtcaaagatagtgtctcttcttctagttatctacagatgagattcagagagttaaaagaaaagtatgaaagaggaactctggaagaaaaagacaaaaagatgatatttcttactaatttgtttgagaaagcatcagtgtccgaagattcagacgttctaacaatcgggatgaaatttcaaaccatgttaactcagatcataaaattgcctaatttcataaatgaaaatgctttaaataagatgtcaagttataaggatttctcaaaactttaccctaatctaaaaaagaatgaagatctatataagagtactaagaacttgaagatagacgaggatgctgttttagaggaagatgagttatatgagaagattgcgtctagcttagaaatggagtctgtccatgacataatgataaaaaatcctgaaacaattctgatagcaccattgaatgatagggattttttacttagtcagctgtttatgtacacaagcccttccaaaaggaatcaattatcgaaccaatctacagagaaacttgctttagatagggtattaaggtcaaaagctagaacatttgtggacatttcttccactgtgaagatgacttatgaagaaaacatggaaaagaaaatcttagaaatgctaaaatttgatttagattcatattgttcatttaaaacatgtgtaaatctagtaatcaaagatgttaatttcagcatgctgattccaatattggattctgcatacccttgtgaatctagaaaaagagataattacaatttcaggtggtttcagactgagaaatggatacctgttgttgaaggctctccgggactagtagtgatgcatgctgtttatggatcaaattatatagaaaatttaggtttaaaaaacatccctctaacagatgatagcattaatgttttaacaagcacatttggaacaggtctaatcatagaagatgtgaaatctctagttaaaggtaaagacagctttgaaacagaggcttttagtaattctaatgaatgtcaaagattggtgaaagcatgcaactatatgatagcagcacaaaacaggcttttagcaattaacacatgcttcactaggaaaagcttccctttctattccaagttcaatctagggagaggatttatttcaaacacactagctctcctatccaccatctacagcaaagaagaatcctatcattttgtttctacagctagttataaactagacaaaaccatcagaactgtgataagcgctcagcaagatatgaacttggaaaaaatactggacactgctgtatacatatcagataaattgcagtcacttttcccaacaattactagagaagatatagctttgatattacaaaatgtgtgccttgacagcaagcctatatggcagagtctagaagacaaaatgaaaaggattaacaattcaacagctagtggcttcacagtatcaaatgtgatcctatcacataacagtgaattgaacacaatccagaaacaaattgtctggatgtggaacatgggtttgtgttctcatagaacattagattttgttatcagatatattcgaagaagtgatgtaagatatgtgaaaactgaagaacaagacgaatcacgaaattatgtctctggaacaatgtacaaaattgggatcatgacaagaagctgttatgttcaattgatagcttctgatcatgatgtagcagtttctttgagaacaccattcgagatattgaatgaaagagagtatctttttgatacatacagagagagtatagagaaattgctgcagaaatttatgtttgataaagtgaacataataaagtcaaaacaaccacagattgtcttcttagaaccaggagatgcctgcattagaatgactacagataacaaaatgattgtcaaggttaatgccacatcaagacaaataagactagagaatgtaaaattagttgtgaagataaaatatgaaaatgtgaactctgatgtatgggatattatagaaggccaaaagtctctagtcttgaggcttcctgaagtaggggaatgtttctctgatatgtacaaaactgcagactctgaaaccgaaacaatcaaaaccataaaaaacaggctcatgacctctttaactttcatagaagcctttggaaacttatcacagcagatcaaagagattgtatatgatgatatcagagaaacaatggatgaattcttaatgaacatccgggatacctgcttagaaggtttggaaaactgcaaaagtgtagaagaatatgataattatctcgatgaagatggttttaatgacacagtggaactattcgaaaacttgctaagaacacatgataactttgaagatgagtatagtcctctgttttcagagattgttgataaagcaaaacagtacactagagatttagaaggtttcaaagaaatactgctcatgcttaaatattccctgataaatgatgcatcgggatttaaaagctatagagccactggaatgcatgctgttgaactaatggcaaaaaaacacatagaaataggagaattcaacttgttaggaatgatccaactgattaaagcttgtgaaacatgccacaacaatgactctatattaaacttagcaagtttgaggaatgttcttagcaggacatatgccacattcgggaggagaataggattgaaccatgatctggacttgcaaaacaatttaatggaaaaaagttgtgatttcaagacgctggttttaccagacataaaattatcagaactatctagggagatactgaaagaaaatgggtttgttatatctggagagaatctaaaaatggataggtctgatgaagaatttgagggtcttgctagttttaatgtgttgaggctagatgaggaagaaatgtatgaaggtttgatcaaagaaatgaaaattaaaaggaaaaagaaagggtttttattcccggcaaatacacttctactaagtgagttgataaaattcttgattggagggataaagggaaccagttttgatatagagacattgttgcggaacagttttagaccagacatattttcgaccgacagattgggtaggttgagttctagtgtacctgcactcagagtttatgcaactgtttatatggaatataagaatgcaaattgtcccttaaatgagatagctgacagcttggaaggttatctaaaactgacaaaaagcaagcctaaggagcatttcttgcatggaagagtcaagaaagccttgatacaattaagagatgaacaatcacgaactaaaaaattagaggtttataaagatatcgcaaatttcctttccagacatccactatgtttgtcagagaaaaccttgtatggaagatacacctactctgatattaatgattatatcatgcaaacaagagagattattttgagtaaaataagtgagttggatgaggttgttgaaacagatgaggacaatttcttgcttagttatctaagaggagaagaagatgcctttgatgaagatgaaattgatgaagaagaagatacagattaa

SEQ ID NO: 221 - DNA, 8669 bp, Watermelon bud necrosis orthotospovirus
  source 1..8669: mol_type = other DNA
atgaacattcaaactataaacagttttctagatgcttcaggcgaaaccactgcatatctgcagagaataaaagatgaaatcatgttaatgtcaaatgttatagaacaaggttattctgaaggtaaaggtgtaattgaatctggattgagttctataatgtctatgaattatattctagacaagattgaagacatgaaatcaaaataccatcagagctcctcttctattgatcaaagagaaatggaaacagaaatctatttatttctcgataaatataaagaactagagttgatgaggcatgatctctttggtgttcttgctggaagaagattacattttgttccaaaacacagatctgatgtttttatgaaagattgtcttatgtcttatatagagttctgcagtgcttcagtgtccatttcgaacaaaatagacaaccttgatagtctaaaagaaaaattgatcttccagcacctaacaccagacaattacacaatatacaaagaaaccaaaggtgagaaagcatgtttgatgatatatgattggaaagtgtctgtagatgctgtgtctgaaggcaagacgtcagaaaactattacacaagtgtttggaaaacttttaaagatatcactatagacgaagaaccttttttagagagacacccaatattcataaccattgttgtgttgaatcctagcggtaatatgccaattgtggcaacaacttgccgggtcgtccaggagttcaggaactcaccatataaaaccttcaatgaccgcaaacgagctgctgaagcagcaaagctaatatcagttaattctctaggtcagcttataggtctgggtgctgactgttttaggcggttttactcagaaacacaatcgtttaagaactctctcttatctaaggttggcaagtatatgaacaggtcatcggaggttttctttagccactggtcatgtgaatacaggaaaactaatttatcaaacaatcaaattagtcaagatattattgatttgatcaattccttgcctaacgatgtggtggggaaggagatccttgttcattttctttttgggaattatttatacttcaaagagactatgagtgaacttcatctcaaagatagatttgaggggtacagatcacactgcaaaatgatgagaattcgtcctttggaaaatgaagaaaaacttaaagactatcttgatagaaatgagcatatttttgagagtttgtatgaaacacatctcaaaaagataaaatcagatgtgctactcagaaaatctaaagaaatagagatagaaagcatagagcgagctttcaacattaatgcagaggagtaccaaaaagagtatcctggatgtttcacaaatgatcttcaagaaactaaaacaaacttttcaatctgctggtcaccaatgacagaagaactaaagatgaatgatcttaattataataatgcaataatacaatctttcagagatgctttgagtgaacagccaaagcttattcaccataaatcatatggtggggctaaagtagacacttatttttccacaactctttttaatttagttagagcttgtctagtagatctaagtacagatacaacgggacattcaaaggctaccttagaagacgtagtggatattaaagatggcagcatccaggtaaaaagaactgaagcctcacagagatggagagaaatagggaatgtcaagactagaaatgggaatgagttcacgttatcaccgcaagcagacactgaagcaagaaagaattttttcagaggtttaaacttgatgtatgttgacatggggaagaaaaagaagatagatataaagaatgaattaaaaagcaagatccaggagtcaatggctcagcaaaagaatgaaaacatggatggcccgagcggggagtatgatgtgtcaaaagccaatatacctcaccaaacgagcctcaaagggatcacacataacaaaaagctaatcagacatgataacccagatgttaaatatcattgtgagtcaatgattgaatctatgtacgtccttcatggtatggacgaaagaaaagataaaaatagtaaaataaattctgtctacaatgaatattgctcaaatccttcttcactatttactaaaggcaatttgatagaaactgaaatgacaattgcaaagaatatccatgaagtagctaaggaactttcaatttacacatatagtgaagacatgatgcagatggcaaaaggtttgatggtggctgacaggtttatgaagaaaacagacttcaagatcttaacttgtgccaatacaagcatgatatgcctagcattcaaaggtgacggcataaacacagggaagtcaggtgtgccttacatcaccatacacaaggtagacaagagcatccaaccacactttgtttctttatacacaaaagaactaatagtgtcttttaaatcagagaattattttattaatatcatgaggccacaaaggctaaatcaggtgcgacttctcagcctgttcaaagctcctagtaaagtccctatcctcttttcacaatattccttattgagtacagagataaaaaaatggttgaatcagcaatccatagatgttttcacttgccctgaaaataagatccagtatctgcaaaagatattattctcctctgtgatcattggcactgtgaccaaactcagcagaatgggaatttttgatttcatgaggtatgcacggtttctaccactgtctgattattccaatataaaggaatatatagctgagaagtttgacccagatataacaaatgttattgattgtttttttgtttctggaattaagaatcttcttctgaaaatggaaggtataaatttaagtaatagtataaaacctctgactatagatcaagaaaatgatatgtctggaggtatatcagatttagacatcatatgccctatcacaggatctacactaaagactatagagtgtctgtataacaatgtctatcttgcaatttacatgatgccgaaatctctccacactcatgtacacaatctcacaacacttctgagtgtcccggctgaatgggaaattaagtttagagaaaaaatgggctttatgataggagatgaaattaaaccaaagaaagaaatgttcaatgattctggtccattctcaattaatggagtgctcaatgtgaaaactttgtttgattattacaagaaaaatattacaaatgttggtgcttgtagatcaaatatagaagaaaaagaggattttttgtctgctccatataaaataaaaactttaacatcatctaaaaaatgctcaaaggcagatatcataaaaagtacagagatagttgctgctttaaaatcatcatatggaaaacagccagatgatataaagggttcagacctttatatactgaagggagttctgaagtgttttgatgaagatagagattcattaaccaacttcttggaggtagaaggcttagaagagtcaaaatatttacatttttttaccaacatgatgtcaggtgataataaaatattgatgaaaactaaccaagacaaattttattataaaagtcatcctttgacagtggagacatttatgaaagttaggtatggttatttcaagacaaccactgttttaaaatcaaaaaaagtaagtgaggaattgtatgatttaatcaaagagttcaacaagataacagaggttgacctggaagctttggaaaagctaggtcgtggactaaaaggcaatcgagtcacatttatacaattattggaatttattttgatgaaatccagaaccaatgctgggaacacagatttcttggtatcaatatttgaaaagatgcagagaacaaagatggatagagagatttatcttatgagcatgaaaacaaaaatgatgttgtattttatagagcatacatacaagcatgtggctcaatctgatccttctgaagccatctcgatctctggagactacaaaattaaaaatttggcatctttatcatatgatactataactaattacaacacagctcttcagaaaaatcttgaatgcaaaatggcttttttatctgcagatcaatcaaaatggtctgcatcagatctaacctataaatacatcttggctgttattatgaatcctcttttaaccacaggagaaataaacctgatgtgtgagtgcataatgatgtatgtaaagttgaagagagtttgtattcctaccgacatctttctaaacctaaaaagagggcaaactgaatatggatcttatggaactgcactgtctgttttaacagataacttagaaacaaatacatttcctgtatccatgaactggctccaagggaatttgaattatctttcgtcagtgtaccactcttgtgcaatgatgggctatgaaaaagctatgaaaaagatgggaaactatgatttcactataagatggatggtgcattcagatgataatgctacttctatggtggttagaggggatataaaagaacttcttgccgagtttaattgcaccagtctgtcagaactgcttttccggagtatacaatcacattttaaaagttattgcataacattaaatccaaaaaagagctatgcctcagaatcagaggtagaatttatatctgaacgaataattaatggtgctgtcatacccttgtattgtagacacttagctaattgtagcacggaaagttcccataatagctattttggtgatctgatgtcactttctatacatataacaatgctcttaagaaaaggatgtcctaatgagctgataccatttgcttatgctgcaatacaaatccaatttctcagcatttactcaatgcttcctggggaagaaaatgatatatcaactattgtcaaagaaattgattttcccttatcaaaaagagaaatcccgatatgtgctggtggttggatgtatgcacctatagaattattgtctatcttaggtccttcatcaaacgatcaattgatttactacaaaatcatcctagatttttttaacctaaaagattttagtagtcttaagaaaagcgtcaactctttaggctacattgatttaagaatcaatgaattgttcaaaagaataaaatatcaaaaaataacaaatgcggataaaaaaatgatatgcatggttaacttatttaaaacaagtttgatgtctgaagactgtgacagtttaaatgtaggaatgaagttccaatccatgatcacacaaattataaaactacctagttttgttagtgaaggctcactgttgaagaactcaagtttccaagacttctgtaagctattccccaatttgaagaaaaacactgacatactcaacgcattaaaacctgttaacttggatgaaagaagccttgaagagttaaatgagagcaaatttttatcacaaatccagctagaagagttgagtaggcacatggcatctcatccagaatcgtttttgatagcaccaatgaatgacaaagattacattttgaccaatctctatacgtatagcagtgtaagcaaaaggaatcaaatgttaaatcaatcaactgagaaattggcattggatagaattttaaggtctaaagctaaaaccttcttagatcccaattcaaaagagatggtttcatataaagaaaatatgtctatgaaaatgagagagataatgagctatgctgggaatgacttcaaaattattaatactatatccagccttatggtgagagacatgaattttgaaatggtcgtctctttaatggagaacactgttgctaatgcttctattcctaaagcgaattataattttagatggttcataactgaaaaagtaccaagtgtcattgagggatcccccggtttaattgttatgtcagctgtttatggcatggattatttgatagagctaggactcaaaaaactccctttgacagaaacctctatctctatactgcatgacatctttggtaacagaaaaacatttgatgatgttaaagagtgtatacagaatgttaaaaagcaatacaagacagaagaatttcaaaatgcagatgttctaaagagatatgtattaagtataaattacatgatccagtcccaaaacaagcttctgtctatcaacacatgtttctccaggaagaatttccctttctattcaaaatataatctaggtaagacgttcataaccaatactttagctatatggagcactatatacagccgattgacaaatataaacttttacaccaatctgaattttgtaattgacaggagttctaggttgattatctcattgcaaagagacatgaatctagaaaaactaattgattgctgtgcctatgtttctgacagattgcaaagcttatttcccgatatgaccgtagagtctatccggcaagttttgtgcaggctaaattttaatggggtagatcttatgaagaaaatgaaatctgaaatagctgaggtaaaaagagccataaacaacataaagacatccactcatgtaactctctcattcaggccacaaatgatagcaatgagcaaacatgcagcatggttatacaattttggatatattaatgagaaagagttcaaatttgtcatagatcagatcagacaaagcgaagtccattatattaaaacagatgagcaagatgtcagaggttactatgtttcaggtcatacatacaaaatagggatcaaaacccagcataactatggacagcttgctatgtcaaaccaagatgtgtcaatccatctccactcaccgtatgaatacaagagagaagatgatgggaaaatatgggatgttcatgttagatctgtatataaattgcttcaaaagctcttaatggacaagcaaagtgtaattaaagcatttttaaatattagaacagaactaatgcccaatcaattttgtattcatgagagttcaaataaaactctattgatattgatcaatgatacaacccgaccaatctcattagagagaatcaaattcaaaggtgatataaaatacattccctcctctgactttgcctgggacatgatgagcaatcagtctaaatacagattgcgacaagcagaaacaggagaatgttacacagaattatacaaactaatagacaacaatgataatttgatgaacactattttaacaaatttaaagaaaagcttagaatatgggaatgaaatggagaaccttatagagcaatcaatccaagggatagatgatgcagatactattgaatatatccaagagtctgttgaccaaatccacaaattagccatagaaggtttagaaacatgtcagacatcagatgaatttgaaaactacctaaaaagagttgattttcaatctacagttgatttccataaagatcttttagagcagattgttgaggaaaaatatggttcagcagaaagactagatgttgctgtagagaagctaaccaaatggacaaacagtttatcaacatttaaagatgtgtgcacaatgttaaagttctccatggtcaatgattctaagggaattaaaacatataaagctaatggagctgatttccactcattatcagcaagtgaagtcatgacttcacaaggatttgatttgttcgaattactgaagttaataaaggcctgtgaagcttgccacaccagcaattcagtattgaacttaattgcttttaaaaatatcaaaaacaaaaccttcatcccagggtttaagagacacttgcccaatacagttcattttgactatgaaatgaaactaaataatgaagtgatgaacaaattctatgagtataaaacaatctcactacaagatataaaagtttctgatagagtaaagagggtccttgaaacaaatgggttcagtatcacaggccacaatttgaagttagaagaaacaaacttagaattgaaccccgtggagattatagatgactcttccacttatgatcaggttgccaagcaaatgaggttaacaaagaaaaagagctcatatcttatacctgctaacactctattgttaggagaactaatgaagttcttgatgctgtgcatcaaaggagaagaacatgatataatgaaacttttgagaagtcattttgcaatgcagcctgtaagagaaaatagattgctttgtatccaagatgctgttatgacatgcaggataagtggttatatccaaagacactttctcaatgacaagaaagaaatcgtactgttaggtgtagctgacagcttagagaacttcatttccttagcaactccaaactatgcaacacaggagccatttaaagcagaggctttgataaaaaaagccctggcagaagtgtatgattccggtaaatataagatactaaaaaatataagaaattatatagttgatgatgtagaatttcttacagaaaagtgtttatattcaaacataactaatgaggagataagcaacatgatatttaatgcagttagcaaaattgatctggaattatccaatttaaagccaaagaagagaaagaaaagactagacttacatgacgttttcaatggattcttgggatcagatgctactacttcggaacaacaataaaaaggaggtaatctatgggcgggaggaaagga

SEQ ID NO: 222 - DNA, 5535 bp, Turnip yellow mosaic virus
  source 1..5535: mol_type = other DNA
atggccttccaattagcattggacgcccttgcacccacgactcacagagatccctctctgcacccgattctcgaatccacagtggattcaattcgctcctcgatacagacctacccatggtccattccgaaggaacttctacccctactcaactcctacggcatcccaacatctggtttgggaacctcccaccacccccacgccgcccacaagacaatcgagacttttctcctttgcacccactggtctttccaggccaccactcccagctccgtcatgttcatgaaacccagcaagttcaacaaacttgcccaggtaaactcaaactttcgggagctgaagaactaccgcctgcaccccaacgacagcactcgttaccccttcacatcaccagaccttcccgttttccccaccattttcatgcacgacgccctgatgtattaccatccgtcccagatcatggacctgttcttncggaaaccaaacctcgaacgtctgtacgccagcctcgtagtgccacccgaggcccatctttccgaccaatccttctacccaaagttgtacacgtacacgacgacccgccacactcttcactacgtcccagagggtcacgaagccggcagctacaaccaaccgtccgacgcccactcttggctccgaatcaattccattcgcctcggcaaccaccacctctcagtgacgatcctggaatcctggggccccgtccactcgctcctcattcaacgagggacccccccccccgacccatcactccaggcccctccaacactcatgncctcagacctctttcggtcttaccaagancctcgcctcgacgtggtctccttccgaatccccgacgccatcgaacttccacaggccacattcctccaacaaccacttcgagaccgactggtcccccgagccgtctacaacgccctgttcacctataccagagcagtccgcacactccgaacttcagacccagcagcattcgtaaggatgcactcctccaaaccggaccacgattgggtcacctcgaacgcctgggacaacctgcaaaccttcgcacttctgaacgttcccctccgaccaaacgtcgtctaccacgttcttcagagcccaatcgcctccctaagcctttacctgaggcaacattggcgccgtcttaccgccaccgccgtccctatcctctccttcctaaccctcctgcagcgcttccttccattgcctatacctctagcagaggtaaaatccatcacagccttccgaagggagctttaccgaaagaaggagccccaccaccccctcgacgtcttccatctccagcaccgcgtccgcaactaccactccgcgatctcggccgtacgcccggcttccccaccccaccaaaaactcccacacgcactccagaaagccgcattactgcttctccgaccgatatcgcccctcttgacagcgaccccgttctttcggtccgaacagaagtccatgctcccgaacgccgaactttcatggaccctgaagcgcttcgctctgccctggcaagcctccctagtcctcctcgctctgtcggaatcatccatactgctccacaaactgttctccccgccaaccctccaagcccaacacgacacctaccaccgacatctccaccctggatcctacagtctccagtgggagaggacgccattgtcgattccgaggacgacagcatttcttcctttcactcccacgacttcgacagcccctccggaccgctccgaagccagtctccctcccgctttcgcctccaccttcgttccccgtccacctccagcggcatcgagccctggagcccagcctcctacgactacggcagcgcccccgacaccgattgaacccacccaacgcacccatcaaaattctgacctcgcgctcgaaagttcaacctcaaccgaacctcccccaccccccatccgatcccccgacangacgccctccgcccccgtccttttcccagaaatcaactcacctcgtcgttttcccccccaacttcccgccacgcccgatctcgaacccgcccacactccaccccctctttccatcccgcaccaagatccgactgactcagcggaccccctcatgggctcccaccttttgcaccattcactgcctgcaccccccacccacccccttccatcttcacagctgttacccgcacctttaacgaacgaccccactgcgatcggcccggtgctcccctttgaagaactccacccacgcaggtaccctgaaaacaccgccactttcctcacgaggctccgttcactcccatcaaaccatcttccacaacccaccttgaattgtcttctctccgctgtctccgaccaaaccaaggtttccgaggagcacctctgggagtccctacagacaattctcccagacagccaactcagcaatgaagagaccaacactctcgggctttcaactgaacacctcactgcgttggcccacctttacaacttccaggcaaccgtttactccgatcgcggccccatcctcttcggcccctccgacaccatcaagaggatagacatcacccacaccaccggaccgccatcccacttttcacccggcaaaagactcctaggcagccaaccctccgctaagggccatccctccgacccactcatcagagccatgaagtctttcaaagtatccggcaactaccttcccttctctgaggcccacaaccatcccacctccatctcacacgccaagaacttgatttcaaacatgaagaatggtttcgacggcgtcctctccctcctcgacgtctccacgggccaacgaaccggacccncccccaaagaacggatcatccagatagaccactaccttgacaccaaccccggcaaaaccactcctgtggtgcatttcgctggcttcgctggctgtgggaagacatatccgatccaacagctcctcaaaaccaaactgttcaaagacttccgggtctcttgccctaccacagaactcagaaccgaatggaagacagcgatggaactccacggctcccagtcatggcgctttaacacttgggagtcttccattctcaagtcatccagaatcctggtcattgatgagatctacaaaatgccaagagggtacctcgacctttccatcctcgccgaccccgccctcgagctcgtcataattctcggcgatcctctncagggcgagtaccactcccaatcgaaagactcatccaaccaccgccttccctctgaaactctcaggctgctaccatacatcgacatgtactgctggtggagttaccgcattcctcaatgcatcgcccgactcttccaaattcacagcttcaatgcctggcaaggagttatcgggtccgtttccactccccatgatcaatcccccgtcctcaccaacagtcatgcctcatctcttaccttcaacagcctgggatatcgctcctgcacgatcagctctagccaaggcctcacattctgcgaccccgccataatcgtcctggacaactacaccaagtggctctcctcggctaacggcctcgtcgccctcactcgatccagatcaggcgtccaattcatgngcccctcttcctacgtcgggggaaccaacggctcttccgccatgttttccgacgccttcaacaacagcctcatcatcatggatcgctacttcccatccctgttcccgcaactcaagctcatcacctcccccctcacaactcgcggccccaaactcaacggggccacccccagcgcatcccccacccaccgttcgccaaacttccaccttcccccacacattccgctctcctatgatcgtgattttgttacggtgaacccaactctccccgaccaaggacccgaaacaagactcgacacccactttctcccaccgtctcggctccctctccatttcgatctcccaccggctatcaccccacccccggtttccacaagcgtcgacccgccacaagcgaaagctagccccgtctacccaggcgagttcttcgattctctggcggcgttcttcttaccagcacacgacccatcaacaagggaaatactccacaaagatcaatctagcaaccagttcccctggttcgaccgacccttcagcctgtcctgccagccctcaagtctgatttccgccaagcatgcacccaaccatgatccgacccttctaccggcctccatcaacaaacgcttgcgattcagacccagtgactcaccgcaccaaatcaccgcggacgacgtggtcctaggcctgcaactctttcactctctttgtcgcgcctactcacgtcaacccaacagcaccgttccattcaaccctgaacttttcgcagaatgcatctctctgaatgagtacgcacagctcagttccaaaacccaatccaccatagtggccaacgcttcacgctccgacccagactggcgacacaccaccgtcaagatcttcgcgaaagcccaacacaaagtcaacgacggctccatcttcggctcgtggaaagcctgccagaccctcgcactcatgcacgactacgtgattctggttcttggacccgtcaagaaataccagagaatcttcgacaacgctgaccggccacctaacatctactcacactgcggcaagacacccaaccaacttcgagattggtgccaggaacatctcactcattccacccccaaaatcgcaaacgactacaccgctttcgaccagtcccagcatggagaatccgtggtccttgaagccctcaaaatgaagagactgaacattccnagccatctgattcagctccacgtccacctcaagaccaacgtctccacccagttcggccccctcacatgcatgcgcctaaccggggaacccggaacttacgacgacaacactgactataacctcgcagtcatctactcccagtatgacgtcggttcctgccccatcatggtttctggcgacgactcactcatagaccacccccttcccactcgccacgactggccatccgttctcaaacgcctccacctccgcttcaaacttgaactcacctctcaccccctcttctgtggctactacgtcggtccagccggctgcatccgcaaccccctggcccttttctgcaagctcatgatcgccgtggacgacgacgccctcgacgaccgacgactcagctacctcaccgagttcaccaccggacacctccttggcgaatcactgtggcacctcctccctgaaacccatgttcagtatcagtcagcctgctttgacttcttctgcaggcggtgcccaagacacgagaaaatgctcctcgacgactccacacccgcactcagcctcctcgaacgaatcacttcttcgccgaggtggctcaccaaaaatgccatgtacctcctccctgccaagctacgactggccatcacctctctatctcaaacgcagtccttcccagaatccatcgaggtttcccacgctgagtctgaattgcttcactacgtccaatag

SEQ ID NO: 223 - protein, 415 aa, Citrus tristeza virus
VVRSQAIPPRKASLQENLLSYESRNYNFIKTERFVGPSEFGRAMAAAVIERCFKMEEMAKIRCDIISLTEANILKWLDKRTPCQIKAVHGELKLPFSVEEQISNFKLMVKRDAKVKLDDSSLSKHPAAQNIMFHKKFINAIFSPCFDEFKNRVLSSLNDNIVFFTEMTNAGLAEIIRRIIGDDDNLFVGEVDFSKFDKSQDLFIKEYERTLYSEFGFDTELLDVWMEGEYRARATTLDGQLSFSVDGQRRSGGSNTWIGNSLVTLGILSLYYDVSKFDLLLVSGDDSLIYSSEKISNFSSEICLETGFETKFMSPSVPYFCSKFVVQTGNKTCFVPDPYKLLVKLGAPQNKLTDVELFELFTSFKDMTQDFGDQVVLEKLKLLVEAKYGFASGTTMPALCAIHCVRSNFLSFERL

SEQ ID NO: 224 - protein, 446 aa, Beet yellows virus
TQVFESGADNVVIRDSAPVNKSTDHDPQRVSSIRSQAIPKRKPSLQENLYSYESRNYNFTVCERFSGPQEFGQAMAMVMLERSFDLEKVAKVRSDVIAITEKGVRTWMSKREPSQLRALSSDLQKPLNLEEEITTFKLMVKRDAKVKLDSSCLVKHPPAQNIMFHRKAVNAIFSPCFDEFKNRVITCTNSNIVFFTEMTNSTLASIAKEMLGSEHVYNVGEIDFSKFDKSQDAFIKSFERTLYSAFGFDEDLLDVWMQGEYTSNATTLDGQLSFSVDNQRKSGASNTWIGNSIETLGILSMFYYTNRFKALFVSGDDSLIFSESPIRNSADAMCTELGFETKFLTPSVPYFCSKFFVMTGHDVFFVPDPYKLLVKLGASKDEVDDEFLFEVFTSFRDLTKDLVDERVIELLTHLVHSKYGYESGDTYAALCAIHCIRSNFSSFKKL

SEQ ID NO: 225 - protein, 295 aa, Potato virus X
GTVRQSPDFDENKIMVFLKSQWVTKVEKLGLPKIKPGQTIAAFYQQTVMLFGTMARYMRWFRQAFQPKEVFINCETTPEDMSVWALNNWNFSRPSLANDYTAFDQSQDGAMLQFEVLKAKHHCIPEEIIQAYIDIKTNAQIFLGTLSIMRLTGEGPTFDANTECNIAYTHTKFDIPAGTAQVYAGDDSALDCVPEVKHSFHRLEDKLLLKSKPVITQQKKGSWPEFCGWLITPKGVMKDPIKLHVSLKLAEAKGELKKCQDSYEIDLSYAYDHKDSLHDLFDEKQCQAHTLTCRT

SEQ ID NO: 226 - protein, 70 aa, Potato virus A
GQLGVWNGSLKAELRPKEKVDLNKTRTFTAAPIETLLGGKVCVDDFNNMFYSLHLKAPWSVGMTKFYGTW

SEQ ID NO: 227 - protein, 236 aa, Potato virus Y
GLLGIWNGSLKAELRCKEKILANKTRTFTAAPLDTLLGGKVCVDDFNNQFYSKNIECCWTVGMTKFYGGWDKLLRRLPENWVYCDADGSQFDSSLTPYLINAVLTIRSTYMEDWDVGLQMLRNLYTEIVYTPISTPDGTIVKKFRGNNSGQPSTVVDNSLMVVLAMHYALIKECVEFEEIDSTCVFFVNGDDLLIAVNPEKESILDRMSQHFSDLGLNYDFSSRTRRKEELWFMSH

SEQ ID NO: 228 - protein, 236 aa, Pepper mottle virus
GKLGVWEWALKAELRSKEKIEANKTRTFTAAPIDTLLGGKVCVDDLNNQFYSKNIECCWTVGMTKFYGGWDKLLTALPAGWIYCDADGSQFDSSLTPYLINAVLTIRYAFMEDWDIGYKMLQNLYTEIIYTPISTPDGTIVKKFRGNNSGQPSTVVDNSLMVVLAMHYAFVREGIAFEEIDSICKFFVNGDDLLIAVNPERESLLDTLSNHFSDLGLNYDFSSRTRNKSELWFMSH

SEQ ID NO: 229 - protein, 235 aa, Bean yellow mosaic virus
GRMGVWNGSLKAELRPQEKVLANKTRSFTAAPIDTLLAGKVCVDDFNNKFYSLHLKIPSTVGITKFYGGWDRLLNSLPDGWVYCDADGSQFDSSLTPYLLNAVLEMRLRLMEEWDLGEQMLKNLYTEIVYTPILTPDGTVVKKFKGNNSGQPSTVVDNTLMVIMAVYYAAEKLGIKGNLEDTLVFFANGDDLLIAIKPECESYLDKFEGLFSELGLKYDFSSRTKNKGDLWFMSH

SEQ ID NO: 230 - protein, 188 aa, Wheat stripe mosaic virus
RVYRFQLKDIEKPFKDAIVDLGKAGQGILAWSKEAHVMFMLAFRVLNDLLLKSLKPWVVYDNSMSEEQFLDKVNAAMTVTPDCAVNSVIDATACDSGQNGFTQLIERQIYARLGASELLLDWYFSFREKYILQAEHVRAPMENVKTSGEPGTLLGNSILMAAILNALVRGSGPFVLVMKGDDGFKRQA

SEQ ID NO: 231 - protein, 401 aa, Rice yellow mottle virus
KQSLTSLILQAGRFNRTVCPPGLAQAVQSLQERYPKVPPRRCLRDEWRFDDIFDEVERILCETGEVNSASSPGVPLAGLANSNGEVRGLARDLVCLAVVERLNALASVDPRQHNWTPRELVEKGLCDPVRLFVKNEPHPRRKLLERRFRLISSVSLVDQLVERMLFGPQNNTEISTWWQWPSKPGMGLLTPEQIRLVWDDVFQKHQAHPAAEADISGFDWSVQDWELWSDLAIRINRGNFQGNLRRAAISRYYCFMNSVFQLSDGTLIQQELPGLMKSGSYCTSSTNSRIRCLMAELIGSPWCIAMGDDSVEGWIEGAQSKYAALGHTCKEYYPCKTRGRELLEFNFCSHLIRRGHAELTSWPKALFRFLSSKHEDFEDLWVELHTCGVWSRIERYLRGIG

SEQ ID NO: 232 - protein, 235 aa, Maize dwarf mosaic virus
GKLGIWNGSLKAEIRPIEKTEANKTRTFTAAPLETLLAGKVCVDDFNNQFYAHHLNGPWTVGITKFYGGWNRLLEKLPDGWIYCDADGSQLDSSLTPYLINAVLNIRLQFMEPWNIGEQMLKNLYTEIVFTPIATPDGSVIKKFKGNNSGQPSTVVGNTLMVIIAFNYTLLSCGVDLEKADDVCRMYANGDDLLLAVNPTHVDILNEFGKHFAALGLNFDFESRTRDKSELWFMS

SEQ ID NO: 233 - protein, 167 aa, Zucchini yellow mosaic virus
DFFKYNKPVTVNQLDHDKFLEAVDGVIRMMCDFEFNECRFITDPEEIYNSLNMKAAIGAQYRGKKKEYFEGLDDFDRERLLFQSCERLFNGYKGLWNGSLKAELRPLEKVRANKTRTFTAAPIDTLLGAKVCVDDFNNEFYSKNLKCPWTVGMTKFYGGWDRLMRSL

SEQ ID NO: 234 - protein, 236 aa, Watermelon mosaic virus
GEKGIWNGSLKAELRPIEKVQANKTRTFTAAPIDTLLGAKVCVDDFNNQFYSFNLKCPWTVGMTKFYGGWDKLMRSLPDGWTYCHADGSQFDSSLTPLLLNAVLSIRCCFMEDWWVGKEMLENLYAEIVYTPILAPDGTIFKKFRGNNSGQPSTVVDNTLMVVIAMYYSCCKQGWSEEDIEERLVFFANGDDIILAVRDEDVWLYDTLSASFAELGLNYNFDERTKKREELWFMSH

SEQ ID NO: 235 - protein, 235 aa, Sugarcane mosaic virus
GNLGIWNGSLKAEIRPIEKTTLNKTRTFTAAPLETLLGGKVCVDDFNNQFYSHHLQGPWTVGITKFYGGWNRLLEKLPDGWIYCDADGSQFDSSLTPYLINAVVKIRLQFMEEWDLGERMLQNLYTEIVYTPIATPDGSVIKKFKGNNSGQPSTVVDNTLMVILAFNYAMLSSGIREDEIDNCCKMFANGDDLLLAVHPDFEYILDGFQNHFSNLGLNFDFTSRTKEKSDLWFMS

SEQ ID NO: 236 - protein, 1616 aa, Tobacco mosaic virus
MAYTQTATTSALLDTVRGNNSLVNDLAKRRLYDTAVEEFNARDRRPKVNFSKVISEEQTLIATRAYPEFQITFYNTQNAVHSLAGGLRSLELEYLMMQIPYGSLTYDIGGNFASHLFKGRAYVHCCMPNLDVRDIMRHEGQKDSIELYLSRLERGGKTVPNFQKEAFDRYAEIPEDAVCHNTFQTMRHQPMQQSGRVYAIALHSIYDIPADEFGAALLRKNVHTCYAAFHFSENLLLEDSYVNLDEINACFSRDGDKLTFSFASESTLNYCHSYSNILKYVCKTYFPASNREVYMKEFLVTRVNTWFCKFSRIDTFLLYKGVAHKSVDSEQFYTAMEDAWHYKKTLAMCNSERILLEDSSSVNYWFPKMRDMVIVPLFDISLETSKRTRKEVLVSKDFVFTVLNHIRTYQAKALTYANVLSFVESIRSRVIINGVTARSEWDVDKSLLQSLSMTFYLHTKLAVLKDDLLISKFSLGSKTVCQHVWDEISLAFGNAFPSVKERLLNRKLIRVAGDALEIRVPDLYVTFHDRLVTEYKASVDMPALDIRKKMEETEVMYNALSELSVLRESDKFDVDVFSQMCQSLEVDPMTAAKVIVAVMSNESGLTLTFERPTEANVALALQDQEKASEGALVVTSREVEEPSMKGSMARGELQLAGLAGDHPESSYSKNEEIESLEQFHMATADSLIRKQMSSIVYTGPIKVQQMKNFIDSLVASLSAAVSNLVKILKDTAAIDLETRQKFGVLDVASRKWLIKPTAKSHAWGVVETHARKYHVALLEYDEQGVVTCDDWRRVAVSSESVVYSDMAKLRTLRRLLRNGEPHVSSAKVVLVDGVPGCGKTKEILSRVNFDEDLILVPGKQAAEMIRRRANSSGIIVATKDNVKTVDSFMMNFGKSTRCQFKRLFIDEGLMLHTGCVNFLVAMSLCEIAYVYGDTQQIPYINRVSGFPYPAHFAKLEVDEVETRRTTLRCPADVTHYLNRRYEGFVMSTSSVKKSVSQEMVGGAAVINPISKPLHGKILTFTQSDKEALLSRGYSDVHTVHEVQGETYSDVSLVRLTPTPVSIIAGDSPHVLVALSRHTCSLKYYTVVMDPLVSIIRDLEKLSSYLLDMYKVDAGTQXQLQIDSVFKGSNLFVAAPKTGDISDMQFYYDKCLPGNSTMMNNFDAVTMRLTDISLNVKDCILDMSKSVAAPKDQIKPLIPMVRTAAEMPRQTGLLENLVAMIKRNFNAPELSGIIDIENTASLVVDKFFDSYLLKEKRKPNKNVSLFSRESLNRWLEKQEQVTIGQLADFDFVDLPAVDQYRHMIKAQPKQKLDTSIQTEYPALQTIVYHSKKINAIFGPLFSELTRQLLDSVDSSRFLFFTRKTPAQIEDFFGDLDSHVPMDVLELDISKYDKSQNEFHCAVEYEIWRRLGFEDFLGEVWKQGHRKTTLKDYTAGIKTCIWYQRKSGDVTTFIGNTVIIAACLASMLPMEKIIKGAFCGDDSLLYFPKGCEFPDVQHSANLMWNFEAKLFKKQYGYFCGRYVIHHDRGCIVYYDPLKLISKLGAKHIKDWEHLEEFRRSLCDVAVSLNNCAYYTQLDDAVWEVHKTAPPGSFVYKSLVKYLSDKVLFRSLFIDGSSC

SEQ ID NO: 237 - protein, 1616 aa, Tomato mosaic virus
MAYTQTATSSALLETVRGNNTLVNDLAKRRLYDTAVDEFNARDRRPKVNFSKVVSEEQTLIATKAYPEFQITFYNTQNAVHSLAGGLRSLELEYLMMQIPYGSLTYDIGGNFASHLFKGRAYVHCCMPNLDVRDIMRHEGQKDSIELYLSRLERGNKHVPNFQKEAFDRYAEMPNEVVCHDTFQTCRHSQECYTGRVYAIALHSIYDIPADEFGAALLRKNVHVCYAAFHFSENLLLEDSHVNLDEINACFQRDGDRLTFSFASESTLNYSHSYSNILKYVCKTYFPASNREVYMKEFLVTRVNTWFCKFSRIDTFLLYKGVAHKGVDSEQFYKAMEDAWHYKKTLAMCNSERILLEDSSSVNYWFPKMRDMVIVPLFDISLETSKRTRKEVLVSKDFVYTVLNHIRTYQAKALTYSNVLSFVESIRSRVIINGVTARSEWDVDKSLLQSLSMTFFLHTKLAVLKDDLLISKFALGPKTVSQHVWDEISLAFGNAFPSIKERLINRKLIKITENALEIRVPDLYVTFHDRLVSEYKMSVDMPVLDIRKKMEETEEMYNALSELSVLKNSDKFDVDVFSQMCQSLEVDPMTAAKVIVAVMSNESGLTLTFEQPTEANVALALQDSEKASDGALVVTSRDVEEPSIKGSMARGELQLAGLSGDVPESSYTRSEEIESLEQFHMATASSLIHKQMCSIVYTGPLKVQQMKNFIDSLVASLSAAVSNLVKILKDTAAIDLETRQKFGVLDVASKRWLVKPSAKNHAWGVVETHARKYHVALLEHDEFGIITCDNWRRVAVSSESVVYSDMAKLRTLRRLLKDGEPHVSSAKVVLVDGVPGCGKTKEILSRVNFEEDLILVPGRQAAEMIRRRANASGIIVATKDNVRTVDSFLMNYGKGARCQFKRLFIDEGLMLHTGCVNFLVEMSLCDIAYVYGDTQQIPYINRVTGFPYPAHFAKLEVDEVETRRTTLRCPADVTHFLNQRYEGHVMCTSSEKKSVSQEMVSGAASINPVSKPLKGKILTFTQSDKEALLSRGYADVHTVHEVQGETYADVSLVRLTPTPVSIIARDSPHVLVSLSRHTKSLKYYTVVMDPLVSIIRDLERVSSYLLDMYKVDAGTQXQLQVDSVFKNFNLFVAAPKTGDISDMQFYYDKCLPGNSTLLNNYDAVTMKLTDISLNVKDCILDMSKSVAAPKDVKPTLIPMVRTAAEMPRQTGLLENLVAMIKRNFNSPELSGVVDIENTASLVVDKFFDSYLLKEKRKPNKNFSLFSRESLNRWIAKQEQVTIGQLADFDFVDLPAVDQYRHMIKAQPKQKLDLSIQTEYPALQTIVYHSKKINAIFGPLFSELTRQLLDSIDSSRFLFFTRKTPAQIEDFFGDLDSHVPMDVLELDVSKYDKSQNEFHCAVEYEIWRRLGLEDFLAEVWKQGHRKTTLKDYTAGIKTCLWYQRKSGDVTTFIGNTVIIASCLASMLPMEKLIKGAFCGDDSLLYFPKGCEYPDIQQAANLMWNFEAKLFKKQYGYFCGRYVIHHDRGCIVYYDPLKLISKLGAKHIKDWDHLEEFRRSLCDVAESLNNCAYYTQLDDAVGEVHKTAPPGSFVYKSLVKYLSDKVLFRSLFLDGSSC

SEQ ID NO: 238 - protein, 1601 aa, Turnip vein-clearing virus
MAQFQQTIDMQTLQAAAGRNSLVNDLASRRVYDNAVEELNARSRRPKVHFSKAVSTEQTLIATNAYPEFEISFTHTQSAVHSLAGGLRSLELEYLMMQVPFGSLTYDIGGNFSAHLFKGRDYVHCCMPNLDVRDIARHEGHKEAIYSYVNRLKRQQRPVPEYQRAAFNNYAENPHFVHCDKPFQQCELTTAYGTDTYAVALHSIYDIPVEEFGSALLRKNVKTCFAAFHFHENMLLDCDTVTLDEIGATFQKSGDNLSFFFHNESTLNYTHSFSNIIKYVCKTFFPASQRFVYHKEFLVTRVNTWYCKFTRVDTFTLFRGVYHNNVDCEEFYKAMDDAWHYKKTLAMLNAERTIFKDNAALNFWFPKVRDMVIVPLFDASITTGRMSRREIMVNKDFVYTVLNHIKTYQAKALTYANVLSFVESIRSRVIINGVTARSEWDTDKAILGPLAMTFFLITKLGHVQDEIILKKFQKFDRTTNELIWTSLCDALMGVIPSVKETLVRGGFVKVAEQALEIKVPELYCTFADRLVLQYKKAEEFQSCDLSKPLEESEKYYNALSELSVLENLDSFDLEAFKTLCQQKNVDPDMAAKVVVAIMKSELTLPFKKPTEEEISESLKPGEGSCAEHKEVLSLQNDAPFPCVKNLVEGSVPAYGMCPKGGGFDKLDVDIADFHLKSVDAVKKGTMMSAVYTGSIKVQQMKNYIDYLSASLAATVSNLCKVLRDVHGVDPESQEKSGVWDVRRGRWLLKPNAKSHAWGVAEDANHKLVIVLLNWDDGKPVCDETWFRVAVSSDSLIYSDMGKLKTLTSCSPNGEPPEPNAKVILVDGVPGCGKTKEIIEKVNFSEDLILVPGKEASKMIIRRANQAGVIRADKDNVRTVDSFLMHPSRRVFKRLFIDEGLMLHTGCVNFLLLLSQCDVAYVYGDTKQIPFICRVANFPYPAHFAKLVADEKEVRRVTLRCPADVTYFLNKKYDGAVMCTSAVERSVKAEVVRGKGALNPITLPLEGKILTFTQADKFELLEKGYKDVNTVHEVQGETYEKTAIVRLTSTPLEIISSASPHVLVALTRHTTCCKYYTVVLDPMVNVISEMEKLSNFLLDMYRVEAGVQYQLQIDAVFRDSNLFVQTPKSGDWRDMQFYYDALLPGNSTILNEFDAVTMNLRDISLNVKDCRIDFSKSVQLPKEQPIFLKPKIRTAAEMPRTAGLLENLVAMIKRNMNAPDLTGTIDIEDTASLVVEKFWDSYVDKEFSGTNEMTMTRESFSRWLSKQESSTVGQLADFNFVDLPAVDEYKHMIKSQPKQKLDLSIQDEYPALQTIVYHSKKINAIFGPMFSELTRMLLERIDSSKFLFYTRKTPAQIEDFFSDLDSTQAMEILELDISKYDKSQNEFHCAVEYKIWEKLGIDEWLAEVWKQGHRKTTLKDYTAGVKTCLWYQRKSGDVTTFIGNTIIIAACLSSMIPMDKVIKAAFCGDDSLIYIPKGLDLPDIQAGANLMWNFEAKLFRKKYGYFCGRYVIHHDRGAIVYYDPLKLISKLGCKHIRDVVHLEELRESLCDVASNLNNCAYFSQLDEAVAEVHKTAVGGSFAFCSIIKYLSDKRLFRDLFFV

SEQ ID NO: 239 - protein, 1612 aa, Pepper mild mottle virus
MAYTQQATNAALASTLRGNNPLVNDLANRRLYESAVEQCNAHDRRPKVNFLRSISEEQTLIATKAYPEFQITFYNTQNAVHSLAGGLRSLELEYLMMQIPYGSTTYDIGGNFAAHMFKGRDYVHCCMPNMDLRDVMRHNAQKDSIELYLSKLAQKKKVIPPYQKPCFDKYTDDPQSVVCSKPFQHCEGVSHCTDKVYAVALHSLYDIPADEFGAALLRRNVHVCYAAFHFSENLLLEDSYVSLDDIGAFFSREGDMLNFSFVAESTLNYTHSYSNVLKYVCKTYFPASSREVYMKEFLVTRVNTWFCKFSRLDTFVLYRGVYHRGVDKEQFYSAMEDAWHYKKTLAMMNSERILLEDSSSVNYWFPKMKDMVIVPLFDVSLQNEGKRLARKEVMVSKDFVYTVLNHIRTYQSKALTYANVLSFVESIRSRVIINGVTARSEWDVDKALLQSLSMTFFLQTKLAMLKDDLVVQKFQVHSKSLTEYVWDEITAAFHNCFPTIKERLINKKLITVSEKALEIKVPDLYVTFHDRLVKEYKSSVEMPVLDVKKSLEEAEVMYNALSEISILKDSDKFDVDVFSRMCNTLGVDPLVAAKVMVAVVSNESGLTLTFERPTEANVALALQPTITSKEEGSLKIVSSDVGESSIKEVVRKSEISMLGLTGNTVSDEFQRSTEIESLQQFHMVSTETIIRKQMHAMVYTGPLKVQQCKNYLDSLVASLSAAVSNLKKIIKDTAAIDLETKEKFGVYDVCLKKWLVKPLSKGHAWGVVMDSDYKCFVALLTYDGENIVCGETWRRVAVSSESLVYSDMGKIRAIRSVLKDGEPHISSAKVTLVDGVPGCGKTKEILSRVNFDEDLVLVPGKQAAEMIRRRANSSGLIVATKENVRTVDSFLMNYGRGPCQYKRLFLDEGLMLHPGCVNFLVGMSLCSEAFVYGDTQQIPYINRVATFPYPKHLSQLEVDAVETRRTTLRCPADITFFLNQKYEGQVMCTSSVTRSVSHEVIQGAAVMNPVSKPLKGKVITFTQSDKSLLLSRGYEDVHTVHEVQGETFEDVSLVRLTPTPVGIISKQSPHLLVSLSRHTRSIKYYTVVLDAVVSVLRDLECVSSYLLDMYKVDVSTQXQLQIESVYKGVNLFVAAPKTGDVSDMQYYYDKCLPGNSTILNEYDAVTMQIRENSLNVKDCVLDMSKSVPLPRESETTLKPVIRTAAEKPRKPGLLENLVAMIKRNFNSPELVGVVDIEDTASLVVDKFFDAYLIKEKKKPKNIPLLSRASLERWIEKQEKSTIGQLADFDFIDLPAVDQYRHMIKQQPKQRLDLSIQTEYPALQTIVYHSKKINALFGPVFSELTRQLLETIDSSRFMFYTRKTPTQIEEFFSDLDSNVPMDILELDISKYDKSQNEFHCAVEYEIWKRLGLDDFLAEVWKHGHRKTTLKDYTAGIKTCLWYQRKSGDVTTFIGNTIIIAACLSSMLPMERLIKGAFCGDDSILYFPKGTDFPDIQQGANLLWNFEAKLFRKRYGYFCGRYIIHHDRGCIVYYDPLKLISKLGAKHIKNREHLEEFRTSLCDVAGSLNNCAYYTHLNDAVGEVIKTAPLGSFVYRALVKYLCDKRLFQTLFLE

SEQ ID NO: 240 - protein, 775 aa, Turnip crinkle virus
MPLLHTLNTALAVGLLGARYYPEVQTFLGLPDYVGHMKNVVRSVFQGSGLVVVSSDTVGVRGTYSNRGQIGSSLGCILAVPDSGADIEIDLDRLVGTEEEATSCLVEAVGSTADVPRRRVRQKGRFAMHAVNAAKLHFCGVPKPTEANRLAVSKWLVQYCKERHVVDSHIRTIVNTALPRVFTPDAEDIQVVLDLHSVRAHDHRNALAEAGKVRKWWVNLAMHPMTGRSWSRAWRRLCRLPDDQAISFVRXGCLRELVGRETQISRGENPAMRVFPLANPPKVRRIFHICGMGNGLDFGVHNNSLNNLRRGLMERVFYVEDAQKQLKPAPQPIPGIFGKLSGIRRRLVRLAGNHTPVPREKYPSFYKGRRATIYQKALDSLHDRPVSRKDAELKTFVKAEKINFTAKKDPAPRVIQPRDPRYNIEVGKYLKPYEHHLYRAIDAMWGGPTVLKGYDVGELGNIMSNTWDKFRKTCAIGFDMKRFDQHVSVDALRWEHSVYNAGFNCPELAQLLTWQLTNKGVGRASDGFIKYQVDGCRMSGDVNTALGNCLLACSITKYLMKGIKCKLINNGDDCVLFFEADEVDRVRERLHHWIDFGFQCIAEEPQYELEKVEFCQMSPIFDGEGWVMVRNPRVSLSKDSYSTTQWANEKDAARWLAAIGECGLAIAGGVPVLQSYYSCLKRNFGPLAGDYKKKMQDVSFDSGFYRLSKNGMRGSKDVSQDARFSFYRGFGYTPDEQEALEEYYDNLELLCEWDPTGYKEELSDRWILNEFPTTL

SEQ ID NO: 241 - protein, 250 aa, Turnip crinkle virus
MPLLHTLNTALAVGLLGARYYPEVQTFLGLPDYVGHMKNVVRSVFQGSGLVVVSSDTVGVRGTYSNRGQIGSSLGCILAVPDSGADIEIDLDRLVGTEEEATSCLVEAVGSTADVPRRRVRQKGRFAMHAVNAAKLHFCGVPKPTEANRLAVSKWLVQYCKERHVVDSHIRTIVNTALPRVFTPDAEDIQVVLDLHSVRAHDHRNALAEAGKVRKWWVNLAMHPMTGRSWSRAWRRLCRLPDDQAISFVR

SEQ ID NO: 242 - protein, 818 aa, Tomato bushy stunt virus
METIKRMIWPKKEIFVGDFATGVNRTVPVNIFQLVCRVVLRYMRTGKIECDSDSMTKFIVELLKTDCAAKWEWFMKRRQRGDYIVPLSIASIPIIPLLSYATRVRAVSVKAFGNELSFNVRVPRPSVPKKGLLLRLAAGLALAPICALAVYATLPREKLSVFKLRTEARAHMEDEREATDCLVVEPARELKGKDGEDLLTGSRLTKVIASTGRPRRRPYAAKIAQVARAKVGYLKNSPENRLIYQRVMIEIMDKDCVRYVDRDVILPLAIGCCFVYPDGVEESAALWGSQESLGVKXGGLVRLPGVVTQINRDIPSDVLLPQEVLEVRTGPPNAKDRNIFMVAGCPSQARFLVHNHCLKNLKRGLVERVFCVERNGKLARTPQPTKGAFGRLSPFRKAVCEKVGVAHRLGYDGFLSYYSGAKLRTYTRAVESLHITPVSERDSHLTTFVKAEKISTSKGDPAPRVIQPRNPRYNVELGRYLRHMESKLMKAVDGVFGETTCIKGYTADEVGAIFRAKWDRFDKPVAIGLDASRFDQHCSVEALQYEHSFYRAMYPGNKLLGKLLEWQLHNKGKGYVPDGTITYRKEGCRMSGDINTSLGNYLLMCAMVHGYMRHLGINEFSLANCGDDCVLIVERRNLKQIQRTLPEYFLNLGYTMKVEQPVFQLEEVEFCQAHPVQFQGGWKMVRNVRTAMSKDVHCVNNIRDLATRRAWSNAQHHGGLALSAGIPVVETFYSRFKLYDVPRKHQRIDTVTNVHKWRGSGGSYVVTPESRASFWAAFGLTGDEQLALEDRLERWEMDLFGEEGVDAHEPSILDSAVA

SEQ ID NO: 243 - protein, 296 aa, Tomato bushy stunt virus
METIKRMIWPKKEIFVGDFATGVNRTVPVNIFQLVCRVVLRYMRTGKIECDSDSMTKFIVELLKTDCAAKWEWFMKRRQRGDYIVPLSIASIPIIPLLSYATRVRAVSVKAFGNELSFNVRVPRPSVPKKGLLLRLAAGLALAPICALAVYATLPREKLSVFKLRTEARAHMEDEREATDCLVVEPARELKGKDGEDLLTGSRLTKVIASTGRPRRRPYAAKIAQVARAKVGYLKNSPENRLIYQRVMIEIMDKDCVRYVDRDVILPLAIGCCFVYPDGVEESAALWGSQESLGVK

SEQ ID NO: 244 - protein, 2879 aa, Tomato spotted wilt orthotospovirus
MNIQKIQKLIENGTTLLLSIEDCVGSNHDLALDLHKRNSDEIPEDVIINNNAKNYETMRELIVKITADGEGLNKGMATVDVKKLGEMVSLFEQKYLETELARHDIFGELISRHLRIKPKQRSEVEIEHALREYLDDLNKKSCVNKLSDDEFERINKEYVATNATPDNYVIYKESKNSELCLIIYDWKISVDARTETKTMEKYYKNIWKSFKDIKVNGKPFLEDHPVFVSIVILKPIAGMPITVTSSRVLGKFEDSPSALHGERVKHARNAKLLNISYVGKIVGTTPTVVRNYYANTQKIKSEVRGILGDDFGSKDVFFSHWTSKYKERNPTEIAYSEDIERIINSLVTEEIPKEEIIHFLFGNFCFHIETMNDQHIADKFKGYQNSCINLKIEPKADLADLKDHLIQKQQIWESLYGKHLEKIMLRIREKKKKEKEIPDITTAFNQNATEYEEKYPNCFTNDLSETKTNFSMTWSPSFEKIELGSEVDYNNAIINKFRESFKSSSRIIYNSPYSSINNQTNKARDITNLVRLCLTELSCDTTKMEKQELEDEIDINTGSIKVERTKKSKEWSKQGSCLTRNKNEFCMKETGKENKTTYFKGLAVMNIGMSSKKRILKKEEIKERISKGLEYDTSERQADPNDDYSSIDMSSLTHRKKLIRHDNEDSLSWCERIKDSLFILHNGDIREEGKITSVYNNYAKNPECLYIQDSVLKAELETCKKINKLCNDLAIYHYSEDMMQFSKGLMVADRYMTKESFKILTTANTSMLLLAFKGDGMNTGGSGVPYIALHIVDEDMSDQFNICYTKEIYSYFRSGSNYIYIMRPQRLNQVRLLSLFKTPSKVPVCFAQFSKKANEMEKWLKNKDIEKVNVFSMTMTVKQILINIVFSSVMIGTVTKLSRMGIFDFMRYAGFLPLSDYSNIKEYIRDKFDPDITNVADIYFVNGIKKLLFRMEDLNLSTNAKPVVVDHENDIIGGITNLNIKCPITGSTLLTLEDLYNNVYLAIYMMPKSLHNHVHNLTSLLNVPAEWELKFRKELGFNIFEDIYPKKAMFDDKDLFSINGALNVKALSDYYLGNIDNVGLMRSEIENKEDFLSPCYKISTLKSSKKCSQSNIISTDEIIECLQNAKIQDIENWKGNNLAIIKGLIRTYNEERNRLVEFFEDNCVNSLYLVEKLKEIINSGLITAGKSVTSKFIRNNHPLTVETYLKTKLYYRNNVTVLKSKKVSEELYDLVKQFHNMMEIDLDSVMNLGKGTEGKKHTFLQMLEFVMSKAKNVTGSVDFLVSVFEKMQRTKTDREIYLMSMKVKMMLYFIEHTFKHVAQSDPSEAISISGDNKIRALSTLSLDTITSYNDILNKNSKKSRLAFLSADQSKWSASDLTYKYVLAIILNPILTTGEASLMIECILMYVKLKKVCIPTDIFLNLRKAQGTFGQNETAIGLLTKGLTTNTYPVSMNWLQGNLNYLSSVYHSCAMKAYHKTLECYKDCDFQTRWIVHSDDNATSLIASGEVDKMLTDFSSSSLPEMLFRSIEAHFKSFCITLNPKKSYASSSEVEFISERIVNGAIIPLYCRHLANCCTESSHISYFDDLMSLSIHVTMLLRKGCPNEVIPFAYGAVQVQALSIYSMLPGEVNDSIRIFKKLGVSLKSNEIPTNMGGWLTSPIEPLSILGPSSNDQIIYYNVIRDFLNKKSLEEVKDSVSSSSYLQMRFRELKEKYERGTLEEKDKKMIFLTNLFEKASVSEDSDVLTIGMKFQTMLTQIIKLPNFINENALNKMSSYKDFSKLYPNLKKNEDLYKSTKNLKIDEDAVLEEDELYEKIASSLEMESVHDIMIKNPETILIAPLNDRDFLLSQLFMYTSPSKRNQLSNQSTEKLALDRVLRSKARTFVDISSTVKMTYEENMEKKILEMLKFDLDSYCSFKTCVNLVIKDVNFSMLIPILDSAYPCESRKRDNYNFRWFQTEKWIPVVEGSPGLVVMHAVYGSNYIENLGLKNIPLTDDSINVLTSTFGTGLIIEDVKSLVKGKDSFETEAFSNSNECQRLVKACNYMIAAQNRLLAINTCFTRKSFPFYSKFNLGRGFISNTLALLSTIYSKEESYHFVSTASYKLDKTIRTVISAQQDMNLEKILDTAVYISDKLQSLFPTITREDIALILQNVCLDSKPIWQSLEDKMKRINNSTASGFTVSNVILSHNSELNTIQKQIVWMWNMGLCSHRTLDFVIRYIRRSDVRYVKTEEQDESRNYVSGTMYKIGIMTRSCYVQLIASDHDVAVSLRTPFEILNEREYLFDTYRESIEKLLQKFMFDKVNIIKSKQPQIVFLEPGDACIRMTTDNKMIVKVNATSRQIRLENVKLVVKIKYENVNSDVWDIIEGQKSLVLRLPEVGECFSDMYKTADSETETIKTIKNRLMTSLTFIEAFGNLSQQIKEIVYDDIRETMDEFLMNIRDTCLEGLENCKSVEEYDNYLDEDGFNDTVELFENLLRTHDNFEDEYSPLFSEIVDKAKQYTRDLEGFKEILLMLKYSLINDASGFKSYRATGMHAVELMAKKHIEIGEFNLLGMIQLIKACETCHNNDSILNLASLRNVLSRTYATFGRRIGLNHDLDLQNNLMEKSCDFKTLVLPDIKLSELSREILKENGFVISGENLKMDRSDEEFEGLASFNVLRLDEEEMYEGLIKEMKIKRKKKGFLFPANTLLLSELIKFLIGGIKGTSFDIETLLRNSFRPDIFSTDRLGRLSSSVPALRVYATVYMEYKNANCPLNEIADSLEGYLKLTKSKPKEHFLHGRVKKALIQLRDEQSRTKKLEVYKDIANFLSRHPLCLSEKTLYGRYTYSDINDYIMQTREIILSKISELDEVVETDEDNFLLSYLRGEEDAFDEDEIDEEEDTD

SEQ ID NO: 245 - protein, 2878 aa, Watermelon bud necrosis orthotospovirus
MNIQTINSFLDASGETTAYLQRIKDEIMLMSNVIEQGYSEGKGVIESGLSSIMSMNYILDKIEDMKSKYHQSSSSIDQREMETEIYLFLDKYKELELMRHDLFGVLAGRRLHFVPKHRSDVFMKDCLMSYIEFCSASVSISNKIDNLDSLKEKLIFQHLTPDNYTIYKETKGEKACLMIYDWKVSVDAVSEGKTSENYYTSVWKTFKDITIDEEPFLERHPIFITIVVLNPSGNMPIVATTCRVVQEFRNSPYKTFNDRKRAAEAAKLISVNSLGQLIGLGADCFRRFYSETQSFKNSLLSKVGKYMNRSSEVFFSHWSCEYRKTNLSNNQISQDIIDLINSLPNDVVGKEILVHFLFGNYLYFKETMSELHLKDRFEGYRSHCKMMRIRPLENEEKLKDYLDRNEHIFESLYETHLKKIKSDVLLRKSKEIEIESIERAFNINAEEYQKEYPGCFTNDLQETKTNFSICWSPMTEELKMNDLNYNNAIIQSFRDALSEQPKLIHHKSYGGAKVDTYFSTTLFNLVRACLVDLSTDTTGHSKATLEDVVDIKDGSIQVKRTEASQRWREIGNVKTRNGNEFTLSPQADTEARKNFFRGLNLMYVDMGKKKKIDIKNELKSKIQESMAQQKNENMDGPSGEYDVSKANIPHQTSLKGITHNKKLIRHDNPDVKYHCESMIESMYVLHGMDERKDKNSKINSVYNEYCSNPSSLFTKGNLIETEMTIAKNIHEVAKELSIYTYSEDMMQMAKGLMVADRFMKKTDFKILTCANTSMICLAFKGDGINTGKSGVPYITIHKVDKSIQPHFVSLYTKELIVSFKSENYFINIMRPQRLNQVRLLSLFKAPSKVPILFSQYSLLSTEIKKWLNQQSIDVFTCPENKIQYLQKILFSSVIIGTVTKLSRMGIFDFMRYARFLPLSDYSNIKEYIAEKFDPDITNVIDCFFVSGIKNLLLKMEGINLSNSIKPLTIDQENDMSGGISDLDIICPITGSTLKTIECLYNNVYLAIYMMPKSLHTHVHNLTTLLSVPAEWEIKFREKMGFMIGDEIKPKKEMFNDSGPFSINGVLNVKTLFDYYKKNITNVGACRSNIEEKEDFLSAPYKIKTLTSSKKCSKADIIKSTEIVAALKSSYGKQPDDIKGSDLYILKGVLKCFDEDRDSLTNFLEVEGLEESKYLHFFTNMMSGDNKILMKTNQDKFYYKSHPLTVETFMKVRYGYFKTTTVLKSKKVSEELYDLIKEFNKITEVDLEALEKLGRGLKGNRVTFIQLLEFILMKSRTNAGNTDFLVSIFEKMQRTKMDREIYLMSMKTKMMLYFIEHTYKHVAQSDPSEAISISGDYKIKNLASLSYDTITNYNTALQKNLECKMAFLSADQSKWSASDLTYKYILAVIMNPLLTTGEINLMCECIMMYVKLKRVCIPTDIFLNLKRGQTEYGSYGTALSVLTDNLETNTFPVSMNWLQGNLNYLSSVYHSCAMMGYEKAMKKMGNYDFTIRWMVHSDDNATSMVVRGDIKELLAEFNCTSLSELLFRSIQSHFKSYCITLNPKKSYASESEVEFISERIINGAVIPLYCRHLANCSTESSHNSYFGDLMSLSIHITMLLRKGCPNELIPFAYAAIQIQFLSIYSMLPGEENDISTIVKEIDFPLSKREIPICAGGWMYAPIELLSILGPSSNDQLIYYKIILDFFNLKDFSSLKKSVNSLGYIDLRINELFKRIKYQKITNADKKMICMVNLFKTSLMSEDCDSLNVGMKFQSMITQIIKLPSFVSEGSLLKNSSFQDFCKLFPNLKKNTDILNALKPVNLDERSLEELNESKFLSQIQLEELSRHMASHPESFLIAPMNDKDYILTNLYTYSSVSKRNQMLNQSTEKLALDRILRSKAKTFLDPNSKEMVSYKENMSMKMREIMSYAGNDFKIINTISSLMVRDMNFEMVVSLMENTVANASIPKANYNFRWFITEKVPSVIEGSPGLIVMSAVYGMDYLIELGLKKLPLTETSISILHDIFGNRKTFDDVKECIQNVKKQYKTEEFQNADVLKRYVLSINYMIQSQNKLLSINTCFSRKNFPFYSKYNLGKTFITNTLAIWSTIYSRLTNINFYTNLNFVIDRSSRLIISLQRDMNLEKLIDCCAYVSDRLQSLFPDMTVESIRQVLCRLNFNGVDLMKKMKSEIAEVKRAINNIKTSTHVTLSFRPQMIAMSKHAAWLYNFGYINEKEFKFVIDQIRQSEVHYIKTDEQDVRGYYVSGHTYKIGIKTQHNYGQLAMSNQDVSIHLHSPYEYKREDDGKIWDVHVRSVYKLLQKLLMDKQSVIKAFLNIRTELMPNQFCIHESSNKTLLILINDTTRPISLERIKFKGDIKYIPSSDFAWDMMSNQSKYRLRQAETGECYTELYKLIDNNDNLMNTILTNLKKSLEYGNEMENLIEQSIQGIDDADTIEYIQESVDQIHKLAIEGLETCQTSDEFENYLKRVDFQSTVDFHKDLLEQIVEEKYGSAERLDVAVEKLTKWTNSLSTFKDVCTMLKFSMVNDSKGIKTYKANGADFHSLSASEVMTSQGFDLFELLKLIKACEACHTSNSVLNLIAFKNIKNKTFIPGFKRHLPNTVHFDYEMKLNNEVMNKFYEYKTISLQDIKVSDRVKRVLETNGFSITGHNLKLEETNLELNPVEIIDDSSTYDQVAKQMRLTKKKSSYLIPANTLLLGELMKFLMLCIKGEEHDIMKLLRSHFAMQPVRENRLLCIQDAVMTCRISGYIQRHFLNDKKEIVLLGVADSLENFISLATPNYATQEPFKAEALIKKALAEVYDSGKYKILKNIRNYIVDDVEFLTEKCLYSNITNEEISNMIFNAVSKIDLELSNLKPKKRKKRLDLHDVFNGFLGSDATTSEQQ

SEQ ID NO: 246 - protein, 1844 aa, Turnip yellow mosaic virus
MAFQLALDALAPTTHRDPSLHPILESTVDSIRSSIQTYPWSIPKELLPLLNSYGIPTSGLGTSHHPHAAHKTIETFLLCTHWSFQATTPSSVMFMKPSKFNKLAQVNSNFRELKNYRLHPNDSTRYPFTSPDLPVFPTIFMHDALMYYHPSQIMDLFLRKPNLERLYASLVVPPEAHLSDQSFYPKLYTYTTTRHTLHYVPEGHEAGSYNQPSDAHSWLRINSIRLGNHHLSVTILESWGPVHSLLIQRGTPPPDPSLQAPPTLMXSDLFRSYQEPRLDVVSFRIPDAIELPQATFLQQPLRDRLVPRAVYNALFTYTRAVRTLRTSDPAAFVRMHSSKPDHDWVTSNAWDNLQTFALLNVPLRPNVVYHVLQSPIASLSLYLRQHWRRLTATAVPILSFLTLLQRFLPLPIPLAEVKSITAFRRELYRKKEPHHPLDVFHLQHRVRNYHSAISAVRPASPPHQKLPHALQKAALLLLRPISPLLTATPFFRSEQKSMLPNAELSWTLKRFALPWQASLVLLALSESSILLHKLFSPPTLQAQHDTYHRHLHPGSYSLQWERTPLSIPRTTAFLPFTPTTSTAPPDRSEASLPPAFASTFVPRPPPAASSPGAQPPTTTAAPPTPIEPTQRTHQNSDLALESSTSTEPPPPPIRSPDXTPSAPVLFPEINSPRRFPPQLPATPDLEPAHTPPPLSIPHQDPTDSADPLMGSHLLHHSLPAPPTHPLPSSQLLPAPLTNDPTAIGPVLPFEELHPRRYPENTATFLTRLRSLPSNHLPQPTLNCLLSAVSDQTKVSEEHLWESLQTILPDSQLSNEETNTLGLSTEHLTALAHLYNFQATVYSDRGPILFGPSDTIKRIDITHTTGPPSHFSPGKRLLGSQPSAKGHPSDPLIRAMKSFKVSGNYLPFSEAHNHPTSISHAKNLISNMKNGFDGVLSLLDVSTGQRTGPXPKERIIQIDHYLDTNPGKTTPVVHFAGFAGCGKTYPIQQLLKTKLFKDFRVSCPTTELRTEWKTAMELHGSQSWRFNTWESSILKSSRILVIDEIYKMPRGYLDLSILADPALELVIILGDPLQGEYHSQSKDSSNHRLPSETLRLLPYIDMYCWWSYRIPQCIARLFQIHSFNAWQGVIGSVSTPHDQSPVLTNSHASSLTFNSLGYRSCTISSSQGLTFCDPAIIVLDNYTKWLSSANGLVALTRSRSGVQFMXPSSYVGGTNGSSAMFSDAFNNSLIIMDRYFPSLFPQLKLITSPLTTRGPKLNGATPSASPTHRSPNFHLPPHIPLSYDRDFVTVNPTLPDQGPETRLDTHFLPPSRLPLHFDLPPAITPPPVSTSVDPPQAKASPVYPGEFFDSLAAFFLPAHDPSTREILHKDQSSNQFPWFDRPFSLSCQPSSLISAKHAPNHDPTLLPASINKRLRFRPSDSPHQITADDVVLGLQLFHSLCRAYSRQPNSTVPFNPELFAECISLNEYAQLSSKTQSTIVANASRSDPDWRHTTVKIFAKAQHKVNDGSIFGSWKACQTLALMHDYVILVLGPVKKYQRIFDNADRPPNIYSHCGKTPNQLRDWCQEHLTHSTPKIANDYTAFDQSQHGESVVLEALKMKRLNIPSHLIQLHVHLKTNVSTQFGPLTCMRLTGEPGTYDDNTDYNLAVIYSQYDVGSCPIMVSGDDSLIDHPLPTRHDWPSVLKRLHLRFKLELTSHPLFCGYYVGPAGCIRNPLALFCKLMIAVDDDALDDRRLSYLTEFTTGHLLGESLWHLLPETHVQYQSACFDFFCRRCPRHEKMLLDDSTPALSLLERITSSPRWLTKNAMYLLPAKLRLAITSLSQTQSFPESIEVSHAESELLHYVQ

SEQ ID NO: 247 - DNA, 3199 bp, Solanum lycopersicum
  source 1..3199: mol_type = genomic DNA
tcccaaaactcattatttaattttcttctttaacaaagttgacgagacaaaagcaaaatatatacaggaaaaatgggtgatccgttgattgaagaaattgatgttctggatgcacctttaccatattctgtagagacgatgcttgatagaatctgcaaggagcaggggcaaaaaccaccgtgtactggcattagaaggaggctgagctctattggtgaaaaagggtcattagaaatgctcaaaataatatcacgtcgtcctatcaagaagagtctctctgcttttcttgtttacatgattgatcgctacccggattgtctctcctcttcctctagccccttcaattgtctactcaaacgctcttcttcccctcgtctctttccatctccagagggtaaacgtttacaaggtgaaagttcttctaaatcaaagcttgagatgggcttattggcctgtgcaagccctcagaaagttgctcgccagttatcattttgcgaggagcctgaatctaactgtagaagaacctccccttatgtcagccaacagttgatgatcctcaatgaacttgaatttagaaaattgtttctggtactgagctacattggatgcaacaagttggaagatgttatatcccctcaaattgctgatgatattgtaagaaagaaaaatctttccatgactgattttgaatcagaaatttggaatgcttttggaaaagcatgttatgctgtgtcagatagatcaaagtacttagactggaattgcagaaagacacatatctactattgccacattaagcagaacggatactgttccttcaagggtccatacttgaacacattaaggactcacttacagagagccctgggagatgacaatgtactgattgtaaaatttgttgaagatacaagttgtgccaatataattctcgaggaaggcattcttgttggcttgagacgttaccgtttctttgtgtataaagatgataaagagaggaagaaaagtccagctatgatgaagacaaaaactgcttctttgaagtgctactttgttaggtttgagtccattggaacctgcaatgatggagaatcctatgtattttctaccaaaacaatcagtcaagcaaggtgtaaattcatgcatgtgcatatggtttctaatatggcaaaatatgcagccaggctttccttaattctatcaaagacgattaagcttcaaacagatcttgattctgtcaccattgaaagaattgaagatatactttgtcgggatgaaaatggttgtattattcaagatgaagacggcgaacctcgtatacatactgatggtactggtttcatatcagaagatttagctatgcattgtcccaaagatttttcaaaagcagaatatataaaagatgaaaattatgagaattttgttgatatcgtggaccttgatgacgtgaatgtagaaagaagagtgagtgtatctcgcaataggaaaccgcctttgttgatgcagtgccgtttgttcttcaatggttgtgctgtgaaggggacttttcttgtcaatagaaagattggatcacgaaaaattcatattagaccctcaatggtgaaggttgagatagacccaacaatttcaagtataccaacttttgactcattggagatagttgcaatcagtcatagaccaaataaggcatatctgtccaagaatttaatctctctgctgagctacggaggagtccataaagaatactttatggaacttttgggaagtgcgctggaagagacgaaacaagtatatttgaggaaacgtgcagctctaaaagttgctatcaactatagagaaatggatgatgaatgtctaacagcaaggatgatatcgtctgggatacctctcaatgaacctcatctccatgctcgcttgtctaggcttgcaaagattgaaagaactaagcttagaggaggaaagcttcctataagtgacagtttttatcttatgggaacagctgaccccactggtgtactggaaagcaatgaagtctgtgttattctagataatggccaagtatctgggcgtgttttggtctatagaaatcctggtcttcactttggagatgtacatgtgatgaaagcgcgatatgtggaagagcttgcagatgttgttggtgatgccaaatatggtatatttttttcaactaaaggcccgaggtcagctgctactgagattgcaaatggtgactttgatggtgatatgtattgggtttccataaaccgtaagttggtagattcttatacaacaagtagaccatggattcgcatgcattcaactcctaacgcagttagcaaaaaaccaagtgaattttcagctgatgaattggaatatgagctttttaggcaatttctggaagcaaagtctaaaggtgccaatatgtctctggcagctgatagctggctggcatttatggatcgtcttctgacgctgcgagatgataatgtggatgatatgcatagcttgaaaggcaagatgcttcacctgattgacatctactatgatgcattagatgcacctaaaagcgggaagaaggttagcatccctcattatctgaaggcaaacaagttcccccactatatggaaaaagggaactcctgcagctatcattcaacttctattctgggtcagatttatgatcatgtcgactcatatccagatgaagatttgtgtataacagaaatctctaaactgccttgctttgaagttgaaatccctcaaagatgcatgacattgtggagaggaagatatgaagagtacaaaaaggatatgacacgggccatgaactttgattgtgaactaagaatcacctcttgcaatgaagttataaagaagtacaagatgttgctatatggtgctgtggagtttgaacaaacagtaagaaagactgaagacattttcgacgaggcccttgcaatatatcatgtaacatatgataatgcaaggatcacatacagcatagagaaatgtggttttgcttggaaagtagctggttctgcgctttgcaggatccacgccatgtatcgcaaggaaaaagacttgcccattttgccatcggttttgcaggaaatactctagacgtattgtaacattgaagtgatcaataaatatctacttagcattctattctatgtgatgacgtccaaatttacttctcaaa

SEQ ID NO: 248 - DNA, 4902 bp, Arabidopsis thaliana
  source 1..4902: mol_type = genomic DNA
gttgttgctgtctcctctctcaatggctacctcctgcgactgaaacggtaaacctttattctctttagattcgtgtgtattcatcagtatatggtcatgttacaataatatattgcttattaactgatcaatctgttactgtcctgccctgcttactatagtagacagtttctgtggttttgtaatacttaggcatgtgttaactattattagaggacttacagtgagttaaggtgtcttcgtgtgtgtttctctcaaaatgatatatttgttactctgtacatatatatatatatgctcgtggaatcctgatgagaatttggttacagctttatcaatcctctaaatagttttcaacagtgcaaggttttgtgttcctctcttgaaaatatagtctctgaagtgttaacgagctctatatgactgtttgcagagttcaggcagcaatgtaaatgagctggagaatataagcaatgataggactgagtcaatagttcaagaacgtgaaggttctgacaactaagcaaactgcttcttcaatttggttcgataactgtagataaattgtgataaaatatcttttatttgatcaatcattacattattgtagagaatcctcagccaagagattggtagctagatagataaggttgacttggagtcaacttcttccttatagctttcttcatttaatatagtaaacgtttttaactcatttttttccagagaatctgtacccttggcgttcttgtactggttcatcgtagatgattctcgacgactagttgttatggctgaagcatttgtgtcgtttggacttgagaagctttgggatctcctgagtcgagaatcagagcgattgcagggaattgatgggcaacttgatggactaaagcgtcagctgagaagtttacagtcgttgttgaaagatgcagatgccaagaaacatggaagtgatagggtgaggaatttcttggaagatgtcaaagaccttgtttttgatgctgaggatataattgaatcctatgttctgaacaaacttagtggaaaaggaaaaggggtcaagaagcatgtgagacgacttgcttgcttcttgacggatcgccacaaggttgcttcagatatcgagggtatcactaagaggatctctgaagtgattggggaaatgcagagttttgggatacaacaaatcattgatggtggtcgttcgctgtctcttcaggaaagacaaagggtgcagagggagatccgacaaacgtatcctgacagttctgaaagcgatcttgtcggggtggagcagagtgttaaagaattggttggtcatttggtggagaatgatgttcatcaagtggtttctatagctgggatgggcggtattggtaaaaccactctggctagacaagtctttcatcatgacttagtccggcgtcactttgatggattcgcatgggtctgtgtttcccaacaatttacacagaaacatgtttggcagaggatcttgcaagaacttcagccacatgatggggatattttacagatggacgaatatgcacttcagcgtaaactctttcaattgttagaggccggtagatatttagttgtcctcgatgatgtatggaaaaaagaagactgggatgtaataaaagcagtgtttccacggaaaagaggtgagctcttatggtacatacatgaagcactttttcttcttaattcataaaagtgattgttaaaaaagaaatatatagaataattgccttttttattccctagcatgagaaacacaaatatttttgcaggttggaagatgctgcttacttctcgaaatgaaggtgttgggatacatgctgatccaacatgtttaacttttagagcaagcatccttaaccctgaagaaagttggaagctctgtgagagaatagtattccctaggagagatgaaactggtacatatcttattatataatgtttagtttctctaacttttaagaaaaatacatttacatatactaatttacatgtatatatttatattattttataaattttaattttccttaaccaaaaagtaatatttgtatacatattgctattttttccttactattagaacaactaactaaaaacgtatggtaatccatatgctaatttaggcatgtataaaaaaaaaagtcaatggtaatcttgattttgaccaaaaaataattaatttaattagcatgaacaatgagtgttgttaaggttcaaaaggacaatataattattaaacattaatttaattggataacaattaaaaaaattaactattaatcctagtacagtaagtcagtaattacgaatcttgaaaattggttttggtttttttcttcctattttttataggtttattcaaattagaaatatcgaattatctacttttatggtttattcatgattggtttgattaaaatttaacgtaataaaatcaactaaatttgaaagaaacatgtattgattaacccgtgattacacgattccttgtaataaagttcaaatagaatactaagaccaagaatctagtgtattattttaatttggcagctcacatgttgaaatgtattagcttgtgatattgtgcagaagtaaggcttgatgaagaaatggaagccatgggaaaggaaatggtcacacattgtggaggactaccattagctgttaaagcgttgggaggcttgttagctaataaacatactgttcctgagtggaaaagagtttttgacaatattggatctcaaatagtaggaggatcgtggttagatgacaacagtctcaattcggtttaccgaatattgtctctgagttatgaagatttgccaacgcatttaaagcattgcttccttaacctagcccatttccccgaagattccgagatatctacgtatagtttgttctattactgggctgcagaagggatttacgatggatcaaccatcgaagatagtggagaatactacctagaagagctagtgaggagaaatttggttattgcagacgacaactatttgagttggcaatctaaatattgtcaaatgcatgacatgatgagagaagtatgtttatctaaagccaaagaagagaacttcctacaaattatcatagaccctacttgcacctctaccatcaatgctcaatctcctagtagatctcgcagactcagcatacatagtggtaaagcctttcatatattgggacacaaaaacaagacaaaggtgagatctcttatagttccgagattcgaggaagactattggatacgatcagcttcagtcttccacaacttaacattgctcagggtgttggatctttcttgggtaaagtttgaaggagggaagttaccttgtagcattggagggctcatccacttgagatacttgagtttatacgaggctaaggtatctcatctaccttctactatgcggaacctaaagcttctgctctatttgaacttacgtgttgataccgaggaaccgattcacgtgccaaatgttttgaaagagatgatacagttgaggtacctttccctacctcttaaaatggatgataaaaccaagttggaattgggtgatctagtgaacctggagtacttgtatggtttctcaacgcaacacagtagtgtgacagacctcctccgtatgactaagctccggtatctcgctgtatctttgagcgaaaggtgcaattttgaaactctatcgtcatctctccgcgaattgcgaaacctcgagacgcttaatttccttttttcgctcgaaacatatatggttgattatatgggagagtttgttctggatcattttattcatctaaaacagttgggattggcagtacgtatgtcaaagattcctgatcaacatcaattccctccccaccttgtacacttatttctaatttattgcggcatggaagaggatccaatgccaattctagaaaagttgcttcatttgaagtcggttcgtttagcacgtaaggcattcctagggagcagaatggtgtgctcaaaaggcggatttcctcaattatgtgttatagaaatatctaaagaatcagagttggaagagtggatagtagaagaagggtcgatgccatgtcttcgtactttgactatagatgattgcaaaaagttgaaggaacttccagatggactcaagtacataacatccttaaaggaactgaagattgaaggaatgaagagggagtggaaggagaaactggtaccaggtggagaagattactacaaagtccaacacattcccgatgttcaatttatcaactgtgaccagtagcaggtaaaaaataaattgtatagtgttcactttgtttttttctgttgttgttggattcgtgtgaaagtcatgtggacagtctcaactattatacattgttctaacatcgatcatctttgaaataagatgcaggaaagaccaagaagcgagccaaattctcttatattgggagatatagacgctgcttcaacagagtcatctgctgatcaacaggtttttccgaagaatatctggtattgcttatgaagaatacagattctcaagtattaacgattatgtttccagtcttggagctctcgctttttcagtgcatcgttatgttgtgcggctcagaactatattatagaaacaatgcttatattgttgtttgtttttgatgtggatgcatggaacatgcttgagaactcttttacaaaatggagaaacgaaacttgtaaaatttggatattttatgtttgttgtaaaatttggatattttgtgtttgtgtaaaatttggatattatatgttttgctttctcgtttgtgatttaacacagttcgttttgtaagctttatttacagtttacaccatcaaatcttgtc

SEQ ID NO: 249 - DNA, 2931 bp, Arabidopsis thaliana
  source 1..2931: mol_type = genomic DNA
tttctcttcttttttttccctcacttctccaacaaactcgatttcccgatttcgtcgcctcttctcgtctctccgctctcctcgccgcgagtctgtttcgccgccgtctatctcccaattccggtacatcctaaaccatttccccttttaatccaacctgtgttgatttctaatcgcgattaatctcagttaggtttaattgcttgatctcagttgaaattagggcgtaatctcattactaaatgtagcaaaaatcgacaatatagtctcgtctctctgttatagcaatcaatttgtgagattctgaattttggcagaatcctaattctgaagtttggctaatatagaacctgtaattgtgttttttcatttatgagatgttttattaactttgttagtcacaaattgatttcatgtgtataatgttcattatttcgattttgttctcgtatgcgatattacgttcttggctgtgatatctgaagtaaagctgttgtaatctaagtttttcttctcttgattttaaacagtgaccgttgttgtttagtgaatcgatgatttacactgctatcgacaatttttacctatccgacgagcagctgaaggcttcaccttcgaggaaagatgggatagatgaaacaactgaaatctctcttagaatctatggatgtgatctcatccaagagggtggaatattgctcaaactgtatcctttttcttggtctaattattaagcaagactcaaatgttacgtagctgtgattttcttaacttagattgtttattttagaccacaggcagttatggctactgggcaggttctgtttcagcgattctattgcaagaagtctttggctaaatttgatgtcaaggtaaattattttgtttctttcttctagttttgtgtgtttatgaaagtatgataattctttaggagtgtatatactcctgcctatgaccataatgatttgatatgtagtttaatttttacagatagttgctgccagctgtgtatggcttgcatcaaaactggaagaaaaccctaaaaaagctagacaggtcatcatcgtattccacaggatggagtgtcgcagggagaacttgccattagaacatctggatatgtatgccaaggttagtttgcaattgcatttgtcatattgaatgttttttttcgtatattttgtttctactcatgggatagctttatttggaagtacttttatgggatctcatcttttttcctacttgttaaatatctgcagaagttctctgagttgaaagttgaattaagcagaactgagagacatatactgaaagagatgggttttgtttgtcatgttgaacatcctcacaagttcatatcaaactaccttgccacattagaaacacctccagaattgaggcaagaagcttggaatttggccaatgataggtaatctctattctcaaaatcctaatatggatattatttcatatgatttcctaatagttagctacacatcatagtgttgataggttttagagttgatgtttatcctgaagcttggcatttctcctgttctagtttgattttgagtatgtttgttatactttctcaatatctgataattcctttatgattttatcttaatctcatgatatgtctataatgcagtctgcgtacaaccctctgtgtaaggttcagaagtgaggttgtggcttgtggggtagtgtatgctgctgcccgtaggtttcaagtaccactccctgagaatccgccgtggtggaaagcatttgatgcagataaatctagtattgacgaagtgtgtagagttcttgctcatttatacagtcttccaaaggctcagtatatctctgtttgcaaggatgggaagccatttacattttctagcagatccgggaattctcaaggtcaatcagcgacaaaggtgaggtagatcgctttcttggttttgtaatttttgtgaaaacatgagattattgtccatattactgctattatagactcttaaagttgagtgcgtttcttacacagtagtaaacagagtttctaccaccacattgcatgttatatagtattgaaaaagggctgtctactttattatttcggcttgggaaaatctgcaatccaagtgcattttctatgtctgtaatcagagctaggtttgaagtgcttttaacactgttacaggatctgttgccgggagcaggcgaggctgttgatactaaatgtactgcaggatcagctaataacgacttgaaggatggaatggttactacaccacacgaaaaggctacagattccaagaaaagtggtaccgagtcaaactctcagccaattgtaggagactcaagctatgaaagaagtaaagtaggagatagagaaagagagagtgatagagagaaggaacgaggtagagagagggacaggggtaggtctcacagaggcagagattctgacagagacagtgatagggagagagacaaactcaaagatcgaagtcatcatcggtcaagagacagattgaaggattcaggtggacattcagataaatcaaggcatcattcttctcgggaccgtgactaccgcgactcatcgaaagaccgtcgtaggcaccattaagccaatcttcttgtcatctacatccccttgagcctacttgatgttaagacagtatagtgttgtattgtgttaagagtcaaaacccatgtgtacttaatcacatgctaagatcacgttggttcgacatataaaatcgagaaagtctgatatgtttctaatttggaattttgtgaaaagtgccttaaactttggaaaagtggttttttgacttttgacttgtgagttgttgtgaccgagcagagaggagaataatagtatccaaatctgacttgtggcacatgatggtaggcttaaagcacgttcaa

SEQ ID NO: 250 - DNA, 2681 bp, Brassica rapa
  source 1..2681: mol_type = genomic DNA
gagaacgattcgggaagtggcagttcaaatcttgtgttgcagctggtaatggcttttgcctcttcctcatcgagtattgttttaagcaaatgtgaattcgatgtcttttctttccatggtgcagacgtacgtaagaattttttgtcccacgtgcttatcgagctcaaatcaaagggcatagatgttttcattgacaacgatatccgccgatcgaaaagtataggaccttttctaattgacgcgatcaaggggagccgggtcgctatagtactgttatctgaagattatgcctcctcaacttggtgcttgaatgagcttgtggaaattatgaaatgtagaagggagttcggtcaaaccgttatgcccatcttttaccaggtcgacccatcggatgtaaagaaacaaacaggcgaattcggaaaggtgtttcagaaaatatgcaaggggaaaacagaggaaaagattcgtcgctggaaagaggcactcactgaagttgcgaacatcgctggtttccatagtagcaattggaagtctgaggccgaaatgatagagaaaattgcaaccaagatctccaacaaactaaatctgtcagtcccgtgttcgtattgcgacggcttagtaggaatagaaagtcacatgacagagatgcgaagcttgctttctctcgattgtgacgaagtgcggaaggttgggattctaggtatggcgggcatcggaaaaacaactatagctagatccctgtacaacaggcattgccaaaattttcagcgtttcgatggttgctgttttctttcaaacgagattgacgaattgaagcttcaaggtatcgatcagctccaacagaaactactgataaagttattggacgatgagacccttgaagtcggcgcctcgctcggagcacacaaagtactaaaggaccgcctgttaaataaaaagttgttcattgtgcttgataacgttgacaataaacaaatcagtctcctaataggggaggcgggtaagcagctgtatcgagatggcagccggattatcataacaacaagagacaaaaagttattggataaagtcgtagacggaacttacgtggttcctaggcttaacgggcgtgaagctctcgagcttttctgctcgaaagcatttggtaatcattatcccaccgaagagtttgtcgatctgtccaacgacttcgtatgctacgcaaaaggcttaccattggcgcttaagctcctaggaaaagggctgttaacacacgatattaattattggaagaaaaagttggaatttcttcaagtgaacccggacaaagagctccagaaggaactaaaatcatcgtacaaggctctggatgacgatcaaaaaagtgttttcttagacatcgcctgttttttccgcagcgagaaggcagattttgtctcttccatattgaaatcagacgatattgacgcgaaggatgtaatgcgagaacttgaggaaaaatgcctcgtgatgatctcgtatgaccggatagagatgcatgatctactgcacgctatgggtaaggaaattggcaaagagaagagtatcagaaaagccggagaaaggcgtcgcttaagcaattgtgagttgcttctcgacatactatctctgttattcgcaaactccgggtcagaatgcttgaagggtgattttaaagcgcttaatgagattaaggctatcaaaggcttccctgccgcattttcgatgctcggagacgatccctgtggggacggtgatttcctaaagtttcatggcagtcactgcagcactcagggagacaaccgagttgtcaccgatcatgaattccaagcgtctaaaatagtagggccatttccgattgctgtgacaaatctgttagacttgatgcggcttgatctccacaacaagctacctggtaaattcgaccccaaggagctgaaagatttatccttgagatggaatcatatcaaggacgttataccaccggaaattggcgagcttgaaaggctccgtcacctagatctgggatttaactcattcaaaggggagatccctaaggaattagccgcattgcccgagcttcgcgcgaaaaatctcgaagagctagacctggaaggtcgaataccagctgagtgtggctcgttacagaacttgcggcatcttgatgccggaaataaccacctcgtcgggaatactagagactgcattaggtttgatggtctattcaagggctttaaaatcaagagtctgaaaaacttaatattgagcggatgtattaaggcaaaagacttccatatcatatctgaagagattgtataccttcacctcgaaaagtttatctgcaatataccgttcgcgattgctcatatccacaaactaatatttctgaacttagatcataatcaattcttggggattcctgacgccttttataagcttaaattcctcaaggagatgtacatcgaaggtaaatccggcgtggagtcactacccacccacaaggttctggaagtctcggatgcagactttgcggtatggtaacgccctagacgatttctacctcctttgatctgttaaatctctcggactgacgaaagagaactttcttcaccactaatctatatttctccttaatcaaaaaaaaaaaaaaaaaaaaaaaaaaaaaaaaaaaaaaaaaaaaaaaa

SEQ ID NO: 251 - DNA, 5238 bp, Capsicum annuum
  source 1..5238: mol_type = genomic DNA
atggaaatcgtaactgctattttgagcccagtcgcagaacacttgatgatactgccagttgcgcgacagattggatatttgttttactataggcgcaacatcaggtctttggaaaatgaaaataagaagctggagggtatcagaagcggggtgcagcacagaaaggatgctgaatggagaaacttacaagtcatgccaccccatgtcgagaattggttaaaggatgttaatgaaactactgctgaggtggcggttttactacgacgtagagctgaggttgaaagaggttgcttctacggttggtgtccaaacttgaagtcacgtcactcgctgagcaggaaagctaagaaaattgaacaggctatgattggtcttcaagatgaaggcacacgttatgctccttcctcctgtccagcaccacttgcagttacagtgatacacagtgatgagtttgactctagaaaacagaaggaggaagaggtcatgacagctttgaaagatgaggggatcactattgttgggatatgtggtatgggtggtgttggtaaaacaacactggctgagaaagtaagagcaagggcaaaacaagaaaggttgtttgattatgttgttgtgctaactatcagtcaacaacaaccagacattaaaaaaatacagcgcgagatcgccgaaggagtcggtctatcattagagggggacgatttgttggagcgtggagatcggctgcgttcaaggttaatgcagaaggacagtcgcgtccttgtaattttggatgatgtttggaagaaggttgatctaaagagggttggaattcccagtggtagcgatcgcaactactggtgcaaagtgatattgacgacgcgtctccgagatgtttgtgacgatatggaggctaaaaagaaagtacatgttgaaatcttatgtgaaaatgaagcatggctcctttttaggcagaaagccggtaattcagctgatgatctctctcttcctgatatagcagaagccgttgccaaagaatgcaaggggctgccacttgcaattgttactgttgcaggagcactaaagggtaaaaccaagcgttcatgggaggatgcccttttagaattaaaaaaagcagcaccaagaaatattcgaggagtgcttgcagatgtgtatcaacctctgaagataagctataatcacttagggagtgatgaagccaaggatgcctttttgctttgttccttgtttgaggaagatagtaatatttggactgaagaattacttagatacggaatggggcttggcatcttttcggaactcgaaaatttagaatgtgcaagaaatagggtgtctaatctgttagaaacattgaaaaattgtttcttgttatcccaagttccaggcaaagattatgtcaaaatgcatgatgtggtccgggacatggctatacatattgcatctgagggtaaccatatttttttggtgagccacaatgtgaactcaaaagagttcccaagaaaagactcttacaagcaatacagtcatatgtcaattgttgcaaataaatttgatgcgcgtcccagaccaatatcttgcccacgattgaagcttctgatgttaaaactccgtttcgaagagggtttcaaattacaggatgatttttttgatggaatgagtgaactcagtgtcataaaactgagtggatatgatcgaaactccattctgccctttccatcatccattcagaggttgtcaaatctgagcacgctttggctgagtaatctaaggttggatgacgtgtccattattggggaacttgtcactttagaaattctcagcatcagaggttctgacttacaggagcttccagtggagatcggaaacttggccaatctaactatgttagagtattggaatactggttacagaaaccgtatgaggatttcaccaggggtcttatcaagactagttcgattggaggaactacatatggtgggagtagaagattgtagttactccaccttgagggagctggaatcgttatcgagattgactgcactgacattagatggatgttccaaagatgtgatttacagtaacttgggcctttcctccaagttgacacggtacgctcttaaaatgggtagacactacacgtttacttcattcatgcaaacttacaacaaggctatctatctagacgtcaccaagggcaccccattgggtgattggatccgcctcctgttgaggaatagcgaatgtgtaagttcaagcggaaaggggtccaagaatgtagtgttcgagttgcagaatgtgaaagatctcaggctgtctttttgtgattcattgaatatccactgtcagaataatattccattccccaaacttgaaaggctgaaagtaaatgggtgtgatcatctacggcatcttttttgtgtgtccttggcttgccctgatgaggggacctctcgaaggacacacatcagacctgacgtaatcaagttccccaatttatattacttggaactgggatttctgaaatgcttcacacactttttcagtgacaccgttgagggcattgagttccctctgttacggaaaatgcatttctggagtttacaaaagttccaaaatttctggcctagagtcaacaatgctatcaccgactcaaatcctctttttaatgaaaaggtttcttgtcccaacctggaattgctacgactctgtgaggccaacagcttaactgctctatgctctcaccaacttccaactgcctacttcagcaaacttgtaaccttgaatgtacttaggtgtggaaaactgagaaacttgatgtctccatcagtggccagaggtcttctgaatctccgaatattactattagaagactgtgaatcaatggaagaagtgatcacagaagaggaacaacaaggagatgaaatcatgtgtaatgaacccttatttccccaattggaagagctgggacttgaaaatctgccaaatctgaggcatttcattttgacaaagcaagctcttgaatttccattcctcagagaagtgcagattcgtaactgccctgaaacgaagatatttgtccaacagagatctgtcagtacatcaagtctcaaaagtgtgaacaatgatgatgagttgaaagttgttgatctcaacaaagcgatgtttaattctaaggtttcttgtcccaacctggaagtgctacgactctataaggctaacagcataagtgctctatgctctcaccaacttccaactgcctacttcagcaaacttaaggaactaggagtagggaattgtggaaaattgagacacttgatgtctccatcagtggccagaggtcttctgaatctccgaaaactatggataggagaatgccaatcaatggaagaagtgatcacagaagaggaacaacaaggagatgaaatcatgtgtaatgaacccttatttccccaattggaagagctgggacttgaaaatctgccaaatctgaggcatttcattttgacaaagcaagctcttgaatttccattcctcagagaagtgctgattcgtaactgccctgaaacgaagatatttgtccaacagagatctgtcagtacatcaagtctcaaaagtgtgaacaatgatgatgagttgaaagttgttgatctcaacaaagcgatgtttaattctaaggtttcttgtcccaacctggaagtgctactactctataaggctaacagcataagtgctctatgctctcaccaacttccaactgcctacttcagcaaacttaaggaactaggagtatggaattgtggaaaattgagacacttgatgtctccatcagtggccagaggtcttctgaatctccgaaaactatggatacgagaatgccaatcaatggaagaagtgatcacagaagaggaacaacaaggagatgaaatcatgtgtaatgaacccttatttccccaattggaagagctgggacttgaaaatctgccaaatctgaggcatttcattttgacaaagcaagctcttgaatttccattcctcagagaagtgctgattcgtaactgccctgaaacgaagatatttgtccaacagagatctgtcagtacatcaagtctcaaaagtgtgaacaatgatgatgagttgaaagttgttgatctcaacaaagcgatgtttaattctaaggtttcttgtcccaacctggaagtgctactactctataaggctaacagcataagtgctctatgctctcaccaacttccaactgcctacttcagcaaacttaaggaactaggagtatggaattgtggaaaattgagacacttgatgtctccatcagtggccagaggtcttctgaatctccgaaaactatggatacgagaatgccaatcaatggaagaagtgatcacagaagaggaacaacaaggagatgaaatcatgtgtaatgaacccttatttccccaattggaagagctgggacttgaaaatctgccaaatctgaggcatttcattttgacaaagcaagctcttgaatttccattcctcagagaagtgctgattcgtaactgccctgaaacgaagatatttgtccaacagagatctgtcagtacatcaagtctcaaaagtgtgaacaatgatgatgagttgaaagttgttgatctcaacaaagcgatgtttaattctaaggtttcttgtcccaacctggaaaagctatatatctattcggacataactgctctatactctcaccaacttccaactacctacttcagcaaacttgggacattgaaagtagaaaattgtggaaaattgagacacttgatatctccatcagtggccagaggtcttctgaatctccgaaaactacggataggagaatgccaatcaatggaagaagtgatcacagaagaggaacaacaaggagatgaaatcatgtgtaatgaacccttatttccccaattggaaaagctgaaacttgaaaatctgccaaagctgaggcatttcattttgacgaagcaagctcttgaatttccattcctcaaattagtggtgattcgtaaatgccctgaaatgaagatatttgtccaacatggatatgtgagtacaccaagtcttgaaattgtgaacgatgatgatgaggtaaaagtagatgatttgaacgaatggatacatcagaggttcaattctaaggaagaagatggaagtgaatctgaatcttctcagggagaagattggaatcgaatctga

SEQ ID NO: 252 - DNA, 682 bp, Arabidopsis thaliana
  source 1..682: mol_type = genomic DNA
tacatgtatatatattaatgttatgctattttcgttatgtaaccaaacaaaagagcttttgagttttggtcgtacaaaaaaaaagaaagggaaaatgaagataggacctgtagggaagcatgatgctagaagcactacaattgtaaactgggacgaaggatctcacgatggcttcatctctcagatttttctatctcatggcgtcgctggaattatgtctatccaattccagttcgtgatggacggaaaactcgttttatccgatcgtcacggtccattttccggcaacatgtttgacgttatagagctcaactatccgcatgagtacataactggaatcagtggagagtattacaagtatgaagccaacaatcctcacatgaggtctctcaaattcaataccaacactagcgagtacggtccttttggcacctccggttcgagcaacgacaaatttgcttttaaactcgggaaatctcctcagttcggcggtttccatgggacttatgatgcctcgggactacagtacattggtgtttatctccgcccaaaaacagttctacccaaaatagatacgggcaatgcagaggaaacagagtcaaaaattgtactgggctgaaagtgtttgtatacgactctattctgctgattgtacattcttaattatgaaaattcttctatg

SEQ ID NO: 253 - DNA, 3741 bp, Solanum peruvianum
  source 1..3741: mol_type = genomic DNA
atggctgaaaatgaaattgaggaaatgttagagcacctgagaaggatcaagagtggaggtgatctggattggctcgacatattgcgaattgaggaacttgaaatggtgctaagagtttttagaacctttacaaagtataatgatgttcttttgcctgattccttagtcgaactcacaaagagggccaaattgattggggaaatacttcaccggttgtttggtaggattccacataaatgtaaaactaaccttaatctagaaaggctagaatcacatttgttggaattctttcaaggtaatacggcaagtttaagtcacaattatgagttgaataattttgatctgtcgaaatatatggattgtctggaaaattttctaaatgatgtactgatgatgttcttgcaaaaggataggttcttccattccagagaacaacttgcaaaacatcgatcaataaaggaactgaaaattgttcaaaagaaaataagatttttgaaatacatatatgccccagagataaatggttatgtcgactatgagaagcaggaatgtttggagaatcgaattcagttcatgactaacactgtgggacaatattgtttggcagtattagattatgtcactgagggtaaacttaatgaagaaaatgacaactttagtaaacctccttacctattatcattgattgtgttagtggagctggaaatgaagaagatttttcatggtgaagtaaaggcttcaaagtttactcaatcaaaaactttcaaggacaagaaattaccaaaaggattttcacatcatctccacaatctgttgatgtatctcagaaacaaaaagctcgagaattttcctaataatatcgctgctcaaaatattgatgtggcaatagagttcttgttggttttccttgatgctgatgtgtcaaatcatgttattaatggtaactggttgaaagaggtcttgttaaaagttggagctatagcgggtgatattctatatgtaattcaaaagcttcttcctagatcaataaacaaagatgaaactagcaacataagtctttgctcaatacagatattggagaagactaaagatctgaaggcacaagttgagacgtactacaaatccttaaaatttactccatctcagttccccacctttggtggattgagctttctgaattctcttttaaggaaactgaatgagatgtcgacatctaagtccggattaggtttcctgatgaaacctcttttagggaatttggagaaagagctatcatctcttacatccattttagagaaggagctctcatccattttccgtgatgtcgtgcaccatgaacataacattcctaaagatcttcagaggcgtaccatcaatttgtcatatgaggctgaggttgctattgattctattcttgctcagtataatgcttttttgcatattttttgctcacttcctacaattgtaaaagagatcaagcaaattaatgcagaggtgactgagatgtggtcagcggacattcctcttaatcctcactatgtggctgctccattaaaacatctgccggatcgacatagcaatcttgtaactgatgaggaggtagtgggttttgagaataaagcagaagaactaattgattatctgattagaggtacaaatgagctagacgttgtcccaattgtaggcatgggaggacaagggaaaacgacaattgctagaaagttgtacaataatgacattattgtttctcgctttgatgttcgagcatggtgcatcatttctcaaacgtataatcggagagagttattacaagatattttcagtcaagttacaggttccgacgacaatggagctacggttgatgttcttgccgacatgttgaggagaaaattaatgggaaagagatatctcattgtattggatgatatgtgggattgtatggtatgggatgacttaaggctttcttttccagatgatggaattagaagcagaatagtcgtaacaactcgacttgaagaagtgggtaagcaagtcaagtaccatactgatccttattctcttccattcctcacaacagaagagagttgccaattgttgcagaaaaaagtgtttcaaaaggaagattgcccgcctgaactacaagatgtgagtcaagcagtagcagaaaaatgcaaaggactgcccctagtggttgtcttggtagctggaataatcaaaaaaaggaaaatggaagaatcttggtggaatgaggtgaaagatgctttatttgactatcttgacagtgagttcgaagaatacagtctggcaactatgcagttgagttttgataacttaccccactgtttaaagccttgtcttctttatatgggaatgttttcggaggacgcaagaattccagcatctacattgataagtttatggattgctgaaggattcgtggagaacactgaatctgggagattaatggaagaggaagctgaaggttacttgatggatctcattagcagtaacttggtaatgctttcaaagagaacttataagggtagagtcaaatactgtcaggttcatgatgttgtgcatcacttttgcttggaaaagagtagagaagcaaagtttatgcttgcagtgaagggtcaatatatccattttcaaccttcggattggaagggaactcgagtgagcttcagttttagtgaagagctttccaagtttgcatctctggtctccaaaacacagaagcctttccatcaacacttgaggtcattgataacgaccaatcgagcaaaatctattaatgatattttctcctgtcagattagtgaattgcgacttcttaaagtcttggatttgagttcttatattgtggagtttttgtcgttagctacattcaaaccactaaatcagctgaagtacctcgcagttcaggcttttgaattctattttgatccaggatcacatcttccccatatagaaactttcattgtaatgaatcttccttattatgatatattgttaccagtgtctttttgggaaatgaaaaaattaaggcatgctcattttggtaaggctgaatttgacaagcaggggctctctgaaggatcctctaaattggaaaatttgaggatattaaagaatattgttggatttgatagggtggatgtgttatcaaggaggtgtcctaatcttcaacaacttcaaatcacatattttgggaataatgaagagcctttttgtcccaaattggagaatcttacccagcttcaacaacttcaactttcctttgcgcgtccccgcactctatccgggttacagttgccttcaaatttaaataagttggtacttgaaggaattcatataggatgtgttattcccttcattgcgggactaccaagcctggaatatctccagttacatgatgtgtgttttcctcaatcagaagagtggtgccttggagatatcacgttccataaacttaagttgttgaaactggtaaagttaaatatatcaaggtgggatgtctcagaggaatcatttccgttgcttgaaacactcgttataaagaagtgcattgacctagaggagattccacttagctttgctgatattccaacattggaacagattaaattgattgggtcctggaaagtatctctggaggattcagctgtgagaatgaaggaagaaatcaaagacactgaaggatgtgatcgtttacacctcgtcaaacaacgctcagattga

SEQ ID NO: 254 - DNA, 7158 bp, Nicotiana glutinosa
  source 1..7158: mol_type = genomic DNA
attttttcacatacagtttcttactcttttcagagaattaacgttgagtccatggcatcttcttcttcttcttctagatggagctatgatgttttcttaagttttagaggcgaagatactcgaaaaacgtttacaagtcacttatacgaagtcttgaatgataagggaataaaaacctttcaagatgataaaaggctagagtacggcgcaaccatcccaggtgaactctgtaaagctatagaagagtctcaatttgccattgttgttttctcagagaattatgcaacatcaaggtggtgtttgaatgaactagtgaagatcatggaatgcaaaactcgatttaagcaaactgttataccgatattctatgatgtggatccatcacatgttcggaaccaaaaggagagctttgcaaaagcctttgaagaacatgaaacaaagtataaggatgatgttgagggaatacaaagatggaggattgctttaaatgaagcggccaatctcaaaggctcctgtgataatcgtgacaagtgagttaaaaacatataagctgaatactttgcattcaaatgagttaaacataatcttaaataaatttttcaattttttggaataaattgatagttgattatatatgtttctatcagttaattacaaactcaataacattattacgtagataaaatttttattagttcttcaaagagtttgatttatgtgcacactctttgtatatatcacaatctttttacttttgtaggactgatgcagactgtattcgacagattgttgaccaaatctcatccaaattatgcaagatttctttatcttatttgcaaaacattgttggaatagatactcatttagagaaaatagaatccttactagagataggaatcaatggtgttcggattatggggatctggggaatggggggagtcggtaaaacaacaatagcaagagctatatttgatactcttttaggaagaatggatagttcctatcaatttgatggtgcttgtttccttaaggatattaaagaaaacaaacgtggaatgcattctttgcaaaatgcccttctctctgaacttttaagggaaaaagctaattacaataatgaggaggatggaaagcaccaaatggctagtagacttcgttcgaagaaggtcctaattgtgcttgatgatatagataataaagatcattatttggagtatttagcaggtgatcttgattggtttggtaatggtagtagaattattataacaactagagacaagcatttgatagagaagaatgatataatatatgaggtgactgcactacccgatcatgaatccattcaattgttcaaacaacatgctttcggaaaagaagttccaaatgagaattttgagaagctttcattagaggtagtaaattatgctaaaggccttcctttagccctcaaagtgtggggttctttgctgcataacctacgattaactgaatggaaaagtgctatagagcacatgaaaaataactcttattctggaattattgataagctcaaaataagttatgatggattagagcccaaacaacaagagatgtttttagatatagcatgcttcttgcgaggggaagaaaaagattacatcctacaaatccttgagagttgtcatattggagctgaatacgggttacgtattttaattgacaaatctcttgtgttcatctctgaatataatcaggttcaaatgcatgacttaatacaggatatgggtaaatatatagtgaattttcaaaaagatcccggagaacgtagcagattatggctcgccaaggaagtcgaagaagtgatgagcaacaacacagtaagtaagctaaataatgcaataatatttaatttctaattttatattctaaagacacatagggcagtcaattccagttatttgttcctcttgcttcatagtcttgacggtacatcattttagttgtttactttagttagtaggagatataaaagtaatattaattacctcattagtaaaaaaaaacattaattgcctaatttgtttagtagccgctttaatttacgttccctaattcgttttttcttatattttttagggatggattagtctagtagccacttaatctgtttgatccaatgtctttctttggattaacttgaaaattttatgacattatatataataactcaatcattcattcactttaccattattattttttatataaagttacaatttattggtactgtttcagttacaattactttccaacatggaaaacttataaactggactccaataaacttataagaaaaatgtaataatagaaaataaaattatataattaattacaaaaaagtatttttctgaagtaacatcagtatttcttaaaaagaatccaattaacattgtatcttaaactttggtattgtaaggcgtgagaaagtagtggccttatttcaatttgacgtgaagaatagaatgccttttaacgacataagggaagggggcaagaataagtttctattcagccgggctcgaagcagaaggtagaacgtaatatcttttgttggttcagctcatcaagctattacaaaagagtccgctcatattaacaaacggagtttatacgacatttgaaattatactttgtagactaatgatcttcttgttaccaggggaccatggcaatggaagcaatttgggtttcttcttattctagtactctacgctttagcaatcaggccgtgaaaaatatgaaaaggcttagggtatttaacatggggaggtcgtcgacacattatgccatcgattatctgcccaacaacttgcgttgttttgtttgcactaactatccttgggagtcatttccatctacatttgaactcaaaatgcttgttcacctccaactccgacacaattctctgcgtcatttatggacagaaacaaaggtacaatagcttgaattctattttgttgtcatttatttttctctctaactatctttgtcctttaatttggtgataatgaacaaatattattgttttttgttatgaaacaataaaagaagaagaacaatattgcagagaaagagggagatggaattcttattgaattttggggcgatttacaatggggtaagacccctctatttacaggggaaaaataacttagcctcaaaataaagctctttaaaagatagacattcactctaaatagaattctattataacacttttggcgtacttccttttttggctagaattatgatacatgtctttaaatgaacagaagttgcttttgtaatttatcaggacttatgttgaaacttatgaaaattgttattgtttatgttgtctaatactaaatataaaatacaataatattttatcgtaattttttaaaaatttgtcaaataatgcaaatgaaaaattaaattttttggtcctttaaaaatttgagaatgaaaaagtacgagttatacttcctaaaagtttgatagtgaataatatgtaaaatttaaagaatgactaatattggactaatactttaaaacaaataacttaatatacaaattatagcgagacattttcattcgttgtactgaatgcaagaaagaaaggaaaaaaaaactcatttataatatagtttgtcttctactattttaccttattgcttcaaatttgtattttatcgattttgctatatcttatgatttttttcacggtcaatattcttcttacaagaataaattttatatacctcaagtgttttgtcaatttgataaataatttttcttatatgatgaacttgtaaaataatagaattggattcttttgctaattagttaattcaacgacttaattatttattctcaacattaaaggaaataatttagtttttattaattcaaactcttagtatttgctcattctaattttcagtccaataagaattcaattttcaaatagtaagaaaagtcatatattttgaattttatgttttccgaagcattgtttgtttgtttaactctacgggagttttctaactcacattttgtataataaaattttttgagtagtagttcagtacaactctaatattaatgggctttaaataaggaaatatatattacgtaaaaatttaaatcattttaaagttctttcctaccaagtaaataagggaaaatttaataacaaaaatttagttgattttaaaatcctaaatattagaaaattaacttaaaatataatttcgtctagtgtaaaatttatttttaaagggtaaaaaagacgaacgacattaagagcctttgtaattttaatatagtataaatataaataatttacctttattcagtttcttaacaagtaattttccatatataaaaaataaatttctatattcacacaaaaataatgtgttggccctcgtaattcaaatactatcattcatttcttgtcgagggagtagtaaatacttttaggaaagttagcaataagtaatcaagaaatcaagaaaacagaggtcatttgatgcccacaaatacaaatgaaaaaacaaaacaaatgttacgaaacaataaaagaacaagaatagcctcaaagtaaaactctctgatagacatttactctaaatagaattctatttataacaatcaaaaagtttctacatttatagatagctccactagccaaatattttattattggaatcagcaaaataggttgtttctttttttattctcattctgtctgtgttctaaacagcatttgccgtctctacggaggatagatctcagctggtctaaaagattgacgcgaacaccagatttcacggggatgccaaatttggagtatgtgaatttgtatcaatgtagtaatcttgaagaagttcaccattccctgggatgttgcagcaaagtcattggtttatatttgaatgattgtaaaagccttaagaggtttccatgtgttaacgtggaatctcttgaatatctgggtctaagaagttgcgatagtttagagaaattgccagaaatctacgggagaatgaagccggagatacagattcacatgcaaggctctgggataagggaactaccatcatctatttttcagtacaaaactcatgttaccaagctattgttgtggaatatgaaaaaccttgtagctcttccaagcagcatatgtaggttgaaaagtttggttagtctgagtgtgtcgggttgctcaaaacttgaaagcttgccagaagagataggggatttagacaacttacgggtgtttgatgccagtgatactctaattttacgacctccgtcttccatcatacgcttgaacaaacttataatcttgatgtttcgaggcttcaaagatggagtgcactttgagttccctcctgtggctgaaggattacactcattggaatatctgaatctcagttactgcaatctaatagatggaggacttccggaagagattggatccttatcctctttgaaaaagttggatctcagtagaaataattttgagcatttgccttcaagtatagcccaacttggtgctcttcaatccttagacttaaaagattgccagaggcttacacagctaccagaacttcccccagaattaaatgaattgcatgtagattgtcatatggctctgaaatttatccattatttagtaacaaagagaaagaaactacatagagtgaaacttgatgatgcacacaatgatactatgtacaatttgtttgcatataccatgtttcagaatatctcttccatgaggcatgacatctctgcttcagattccttgtcactaacagtatttaccggtcaaccgtatcctgaaaagatcccgagttggttccaccatcagggttgggatagtagtgtatcagtcaatttgcctgaaaattggtatatacctgataaattcttgggatttgctgtatgttactctcgtagcttaattgacacaacagctcacttgattcccgtatgtgatgacaagatgtcgcgcatgacccagaaacttgccttatcagaatgtgatacagaatcatccaactattcagaatgggatatacattttttctttgtaccttttgctggcttatgggatacatctaaggcaaatggaaaaacaccaaatgattatgggattattaggctatctttttctggagaagagaagatgtatggacttcgtttgttgtataaagaaggaccagaggttaatgccttgttacaaatgagggaaaatagcaatgaaccaacagaacattccactgggataaggaggactcaatataacaacagaacttccttttatgtaagtctctacttctattagctacaaagtcttcttccaaaatcaatactccatccgttccagtttatgtgaacctattttttgttcgtccattctaaaaagaatgacccctttctaaatttggaaataattttggttaaacttataattctaccattaacgagaagcttttataaccacacaaatattctggggccctttttgaattgtttaggaccataaattccaaaagtcctcattttttcttaaactccgtgcccaatcaaacaagttcacgtaaattggaacggagggaatatattttttcttctcattcttttcccctatttacaggagctcatcaatgggtgatgtacatatcaacaacgagttttaaaggattccaacaagtataactttttatgctcaaatcagctccttgtattgtggagaaagctgagtacgagatgaagttgacgtccgttatcctttatgatctctctgttctttgtgttaacttgcctacttcatcagatgaataacagaagcccgttcctctcattctcaacactgtttgcacgtctgttgttacttgttaaaatggatcttgataaagtaataacatctctatattacttataagtggttttaacaagttcactcttttgcttttgcagttcaaatgggaacacaatgtatattgagaactagaacaatgacactgcatatatatatatatatgtatgtatgtaattctcgtcttttggactagaataccttgtttcattatgaaatgaattaacatcttcgcctttgctgac

SEQ ID NO: 255 - DNA, 9837 bp, Solanum lycopersicum
  source 1..9837: mol_type = genomic DNA
ggatccttctcatttttagattacaagttctatactcttgttctttatagaatatttcaattgtgaattgtaatagttgaaataagttctaagtttaataaaatttgaggaaataattcatcaattaacactcatattttctttctactattttcatcacatacatacttcaaagatatatcattttataatatcaattctaattagcatgagaacacgtgcaagagacacgtgttcaacaactaatattactaaaagtgggaacaaaaaaaattaaaatatcaaaatcatattttatttagttatttaaaggtaattttatttttattcatgatatagtgatgttcatattataatactattattgattactttcttttagggggtaaattgtatggcatggaaaaaaaatattttcagagatgatgattcttttatcattagaaaacttatattagattatttatacttgtatactcgggttagaagttttgtgttctatgagtttctttaatcatgtttgtaattatttcaaagtattgatatatttttataattttgttttactatgttattatataatattgtagagaaaatgatcaaatgccccctcaacgtataactggatttccaactacacacttaaactttacgagagtcctatcacccccctgaactatttaaaaatgaaataattatacccttaaaaaagtcataaccagatctattttcacgtgtttgacacgacatcaaattattattatttttagggataatgcccaagtaccccctcaacctatgcccgaaatttcagagacacacttatactatactaaggtcctattacccccctgaacttattttattaataattttttactcctttttagcctacgtggcactatcttgggggcccaacgatggttgactttttttttcaaactagtgccacgtaagctaaaaaggggtaaaaaaaattacttataaaataagttcaggggggtaataggaccttagtatagtataagtgtgtctctgggatttcgggcataggttgagagggtacttgtgcattttctcttatttttaccatcactagaacaccataagtccattattgggtctttgaggaagaaaagtgaataataatttatagctcgttcagagatatttgaattttgctcatttgatacctaaaattaactttaaaaaagtgagggggggaggtggggggttagaagacgaatattgtcattaatgatggtcaccgaagataaacaatgctctcaaggaagatgaggaggagcaacctatgatgtctgccacatcatcttctatggcgacaacaatttcaaatagggagagagattctacgatatttgatggattaactagattaatagctaaaattttgtagatataattgattgattgagatttgatattctattagtaaaaaaaatatttttttggttggtccaatcggagtcaaagtaaaacccatattgattttctcaaattaggtccaaagtatcctgaggtaatataaatatatgtaaatttatctcaattgattttggatgattggtaatcaagagttttatatgagttcgaaaatttattttgaatcagaaatagtcaatccggtgaagatattgatggcaacaagacttagaggtggtgaaagattgagagatttgttaataaggaaagggccaaaaataccctctaactttaatttattgattgactttatcccatccgttaaaatgaagttatttataccctcgcctttaacaaacttgtcatttctaccctccaaattaacggttgccctaaattgaccccaaatcccaatttcaatttaaattacccatttgaaattgatttcctcttttaaaccggacccaataaacttaataacattggtgaaacttcaaactttcttcccaattttgtcaaaaacagagattttacacaataatatacaactcaatatacataaaccaacaaaaatgaaaatgcaccattagaggaattgaatagctattgccatggtacaaatcgtttctacatagatgataccaaataaatgagagaacaccattacattatttggtgctgttttcttgtactccgacaacccacaacccttgagcgatcccaatggtgacaaacacaactgaagaacttcttgcagatgcacattatctccgggcaacgatgacgatcaaaaagcaagaggacgaaacccttctgcctcaatgtttcacctcttcttctgcaccatattttcttcgatattccctactttcaatcttttaatttttcgccattgatttgaaccaatagcccccaatatttcaattttttgatcttggaaaaccatgttggtaattggtagaagacagcatcgttcaaatcgatttgtgtcgattcgttggaatcagaggaaaagtagtaagaatggaacgtaccagttcgtcggaaccggaggaatattaataaaagagaagaaagtgaacgaagagagttatccttaattgagatgattctggtaacttttttgtgacgattctggtaacctttgatggagaaataagaagtcattgttcaagttattgagagagaaagaggagatgctttgttgttatttgtttactataatgggtcaggttggattgagtttgggtaataaatgatatggcaattttatttgaaattgggatgatttttattgatttgaggctttccctctaaagaagggtacatatgacaagtttttttcaacggtaaggatataaataacttttttttaatggtaagggtaaagttaaccagtaaatcaaagttgatgaagaagaaagattacaaataagaaaaataaataattgaaaatgcatatatttattgaaagagatattaaaaataaagttttagtaatagattttgatgttcactctccaaagagagtgaaatacactaactatgccagctaagcattcagggaggtaattatttcagttttaaatagtacagagggtaataggactcccgtgaagtttaattgtgtagttgaaaatccaaaaatacattgaggtgacattcaatcattttctaaatattaaaaatttaaagatccataaggggcttacaccctactcatggcttacgtcttgccttttactaagtaaattgtccaagagttgctcaagcatattagtggcctaaagcaaaaatcacttattaataatttttatataattgatttcttctagatttcaattgataataataccattgttattttaaattatttttcatgagatataatattccaaatatgtcaaatttcttttaataattccttcatttcatctaataattccttcatttcatgaaaagtttactttttatacaaataatattcaatattttttttaaaaaaatactccttataacctattattattaaatatgaaacccttaagttttggggtctaagacacatgtctttttttagcactgtcgagtcacctctaaaattgtctcgccttacgcgcgtgttcgttaaaacactgcgcagaatgattattataaaaggaagtgttatttgtagttttgatgatgtgacaaactcagagaccttgtaaaggtaccaggttctcaacatgagttttgatgatgtgatatactcaggaaccttgtaaaggtaccaggttcccaacatgaatagcctgttgactgccagccggagaaggtacagaatgggtgcacatttaccaatggcgtgagaaaagtcagaccttttcaacaaatggcaagagtttaaggaaagggacttgtctatacaatgtcactttcctaaacatcattccttagtttttgcaacttgaaaaagtactctcacgaacatttgcaaaggctatagaaaatccaagtgaagaattattcaaataacaactgaaaattcagaagcatatcgtgtagttgtttgagaatatattcttgtggtcttacattgtaaactgttcctaaatctataaaggaatcagtgtggtggtgttgaaattctaagttgtcttgaagggatagcttagtgggtagaataacttctacttatgcttatcaagcaaaagagttattgcttgatcgtgagattaaaaactttctctcacatttgtgtaactggttttacttttacttgcgaattttagtgaaacagttgtgaaaatcctgtgagacaggtcgtggttttactctcttaagcaaggaggtttccatgtaaaattattgtgttgtcaagctgcatttactttctgtttatactttgtgtgtcaagggacctggtccattgactgataagtagacgcataaattctaacagtaagatacttctcctttttctttaatacaagtaatgtaatttatctctaagaaaatataaaagttcaacaaatgaaagggcaagtatgaaaaaaataataatacaaacttacctcttcaattttaaacaatgattggtataaaaagatgctgccccacgttgtctctctctttcttttttatcgttcacatttttaggaaacttgggctacagcaaaagcaaaagtcattactatactcatttttttgtagctacttaaaaaagagaagaaaaaaatggctgaaattcttcttacatcagtaatcaatgaatctgtaaaaatagctggaaatctactgattcaagaaggaacacgtttattttggttgaaagaggacatcgattggctccagagagaaatgagacacattcgatcatatgtttgacaacgcaaaggcctaggaagttggaggtgattcaagggtcagaaacttattaaaagatattcaagaattggcaggtgatgtggaggacctcttagaacgtatagaactttaattacgtaatcaatttttgttgtttgattttatagatttagacaatatatatataattatttatcgttcaacaaagaagacgattgtgtattcgggttgttcatgaatttcaacttttactatttcattttgaattttttggttagtcatttctatcaatttgcttaggacacctgtgcggaattgttatactactccctttatttcatattacttgaatttgtgaggcaatgcctatatatattaagaaaaatattcaaggacataatttaaatcatgattctattattttcctttgtggaatcataaatataactttgtaagtagtttaatttatctcctaaagcgtacagaacttcaataaataaaaggacaaatatggaaagaatttcaaacatccttcttaaactttgaacaattcaattattatgaacaatgcaaaaacttcaaaaattcactttaatataaaataaaggtaatataatataacatgattttttttttaaaaaagaaaaacatatttgttacatatcactgttgggactcgtcctagggcaaaactctggcaaaacgcctcgagactgaactttgggtcttagttcggtaagaatcacgccctaaactgcagattgtacgtcctaagtacgcccaacacccaacgttcggggctcgactaacatatcttatacaaagtaattatgtgttaaaatctgtatagttaacatttttgaccctcatagttcttgaataaatgaatgatacttaataatttttaaatctgtagagataatagtaactcaaataattagttgtagtatcacatttttactattttataacaatgtaaagatgataatataatatgtaacatttctttcaaaacatatagcaaatttttactttttcttgcttattattgattttcttggttttgtcatttgtgtcaaaactatcctattttatttaactatttgaaaataattttattttgattcatgatatagtgatatttttattataataatattattgattattttcttttagggggtaaaaattttaacatcgatagggcgctcaaagcttacgccttgtacttaaagacgcccccttgacaagactgcagcgagtgattgtcatagaaaaaagaaatttctcctttttcattaatgtgcagctgccccacgttgtcactccccttcttctttatcatttccttcttgacattattaggagacttggccgtggactccatctaccactaaaaagctaaagccatcagtatactcattttttggtagctactgaaaaagagagaaaaaaaaatggctgaaattcttcttacatcagtaatcaataaatctgtagaaatagctggaaatttactgattcaagaaggaaagcgtttatattggttgaaagaggatatcgattggctccagagagaaatgagacacattcgatcttatgttgacaacgcaaaggccaaggaagctggaggtgattcaagggtcaaaaacttattgaaagatattcaagaattggcaggtgatgtggaggatctcttagatgacttccttccaaaaattcaacaatccaataagttcaattattgccttaagaggagttcttttgcagatgagtttgctatggagattgagaagataaagagaagggttgttgacattgaccgaataaggaaaacttacaacatcatagatacagataacaataatgatgattgtgttctgctggatcggagaagattattcctacatgctgatgaaacagagatcatcggtttggatgatgacttcaatatgctacaagccaaattacttaatcaagatttgcattatggagttgtttccatagttggcatgcccggtctggggaaaacaactcttgccaagaaactttataggctcattcgtgatcaatttgagtgttctggactggtctacgtttcacaacagccaagagcgagtgaaatcttacttgacattgccaaacaaattggactgacggaacagaaaatgaaggaaaatttggaggacaacctgcgatcactcttgaaaataaaaaggtatgttatcctcctagatgacatttgggatgtggaaatttgggatgatctgaaacttgtccttcctgaatgtgattcaaaagtcggcagtagaatgataatcacgtctcgaaatagtaatgtaggcagatacataggaggggaatcctccctccatgcattgcaacccctagaatccgagaaaagctttgaactctttaccaagaaaatctttaattttgatgataataatagttgggccaatgcttcacctgacttggtgaatattggtagaaatatagttgggagatgtggaggtataccgctagccatagtggtgactgcaggcatgttaagggcaagagaaagaacagaacatgcgtggaacagagtacttgagagtatgggccataaagttcaagatggatgtgctaaggtattggctctcagttacaatgatttacctattgcctcaaggccatgtttcttgtactttggcctttaccccgaggaccatgaaattcgtgcttttgatttgataaatatgtggattgctgagaagtttatagtagtaaatagtggtaataggcgagaggctgaggatttggcggaggacgtcctaaatgatttggtttctagaaacttgattcaacttgccaaaaggacatataatggaagaatttcaagttgtcgcatacatgacttgttacatagtttgtgtgtggacttggctaaggaaagtaacttctttcacaccgcgcatgatgcatttggtgatcccggcaatgttgctaggctccgaaggattacattctactctgacaatgtcatgattgagttcttccgttcaaatcctaagcttgagaagcttcgtgtacttttctgtttcgcaaaagacccttccatattttctcatatggcttattttgacttcaaattgttgcacacattggttgtagtcatgtctcaaagttttcaagcatatgtcactatcccaagcaaatttgggaacatgacttgcttacgctatctgagattggaggggaatatttgtggaaaactgccaaatagtattgtcaagctcacacgtctagagaccatagacattgatcgacgtagcctcattcaacctccttctggtgtttgggagtctaaacatttgagacatctttgttatagagattatggacaagcatgtaacagttgcttttctataagctcattttacccaaatatttactcattgcatcctaacaatctacaaaccttgatgtggatacctgataaattttttgaaccgaggttgttgcaccgattgatcaatttaagaaaactgggtatactgggagtgtccaattctaccgttaagatgttatcaatatttagccctgtgcttaaggcgctggaggttctgaagctcagtttttccagtgacccgagtgaacaaataaagttgtcatcgtatccacatattgctaagttgcatttgaatgttaacagaacaatggccttgaactctcaatcatttcctccaaatctcatcaagcttactctagcctactttagtgtagaccgttatatactggcagtacttaagacatttcccaaattaagaaaacttaaaatgttcatctgcaagtataatgaagaaaagatggatctctcgggcgaggcaaatggttatagctttccgcaacttgaagttttgcatattcatagcccgaatgggttgtctgaagtaacgtgcacggatgatgtcagtatgcccaaattgaaaaagctgttacttacaggattccattgccgaatcagtttatcggaacggcttaaaaagctgagtaaatgaacatctcaacaggtcagtttgctagtataactatttacgtacaggggtgcatcacagcaacgtgagtgtagtagtgttgtttcttgttgtggttgtttgttggttgttcagatctgaaagtgtgaagctcattagaacacgtctcatagtgatattaaatttacttttaaacaataaaggcgtgtaataagtcattgtaataattaaatcatgtaactgatttttcacgagagaaaatttatgtcattttcctttgtaaagataaagtagtcattggttccaattgtaagattaaatacttgaatacataatatcaggattttgaacacgataatcttacatagaaatcattaggggaacatacctgatgaggaagacatcttcacacacaaaaacgaaagtgttagtcgtaaattgatttctacctccttttcctaactttatgttaccacaatcgtcagcgatagaattattctagagaatatgtggttaactctagtgggtggagggaggaccaattcatagaggttgtgatttaatctgatacgtccatcaattaaccaatgtacggacgagatctattacttaataaatattatttatgatattacttggattacgactaaacttgggtcataagtaagaaataattaataataattcttacagtctcccacttggcccaataaccatatatcattaatatttaataaatattagttgcgcatacaatagatctcttctataatgtcaatcatgcataccacaatatgacaaactactaatgcgagttttgacggttgcacataaattttaagctacatacttccttccatatactactacattagcaacttatcatactaggttcataaggtataaaaacatataacattacggtccacaataatgcctcatataaactcatcttgtaatttctcaaaacaataatgtgtacaccattacgagaaacaagatgttcagaaacacataatttgagctc

SEQ ID NO: 256 - DNA, 3947 bp, Capsicum chacoense
  source 1..3947: mol_type = genomic DNA
tggtggtgcatttctgtcttcagctttgaatgttctctttgataggcttgctcctcatggtgatctgctcaacatgtttcagaagaataagaatgatgttcgactcttaaagaagctgaaaatgactttggtcggccttcaggttgtgttaagtgatgcagagaataagcaggcatcaaatcaacatgtgagccagtggcttaatgaacttcgaggtgctgtggacggtgctgaaaacttaatggaacaagtcaattatgaggctttgaggcttaaggtggaaggtcggcatcaaaatcttgcagaaacaaacaaccagcaagtaagtgacctcaaactgaacttgagtgatgattattttctcgacataaaggagaagttggaagaaaccattgaaacattggaggatttgcaaaagcaaatcggtgaccttggcttacagaagcatttagatttgggtaagaaactagaaactagaacaccttcaacttctttggtcgatgaatctaaaatccttggtagaatgattgaaaaagagagattgattgaccgtttattgtcaagtgattcaaatggagaaaatctgactgttgtccctattgttggaatggggggcgtgggcaagacaacacttgctaaaattgtttacaacgataagaaggtgaaagatcattttggcttgaaagcttggttttgtgtttcggaggcatatgatgctttcagaataacaaaaggattacttcaagaaattggatcattcgacttaaaggatgacaacaatcttaatcagctacaggtaaaattgaaggaaagcctaaagggaaaaagatttcttgttgtccttgatgacttgtggaatgatgactgtgatgagtgggatgacttgaaaaatctttttgtacaaggagctatgggaagtaagatccttgtgacgacacgtaaggaggatgttgccttgatgatgggtaatggggcaatcaatgtgaagactctgtctgatgaagtctcttgggatctattcaaacagcattcattaaaaaacagggatccggaggaacatccagaacttgaagaggttggaaagcaaattgcagacaagtgcaaaggattgcctttagctctaaaggcacttgctggtattttatgccgcaaatcagaggtgtacgagtggaaaaacgtcttaagaagtgaaatatgggagctgccaaggcgtaagaatggtatattaccagagttgatgatgagctacaatgatcttcctgcacatttgaagcgatgttttgctttttgtgcaatatatcccaaagattataaattttgcaaagagcaagttattcacctgtggattgctaatggtctggtacaacagttgcattctggtaaccaatactttaatgagttgagatcaagatcattgttcgaaagggtcccagagtcttctgaaagatacggagggaaattcttaatgcatgatcttgtcaatgatttggcccaaattgcatcttcaaaactttgtgtcaggttggaagagtgccaaggatctcatatattggaacaaagtcggcacacgtcgtattcaatggggagagatggtgactttgagaaattgaaaccgctctctaagtcagagcagctgaggacattgcttccaatctctatccagttcctttaccgccctaaactaagcaagagggtgctgcataacatattgccaagactaacttacttaagggcattatcattgtcatgttatgcgattgtggagcttccaaaagatttgtttatcaaatttaagctcctgagatttttggacctttctcggacagagattacaaaattgcccgattctatctgtgcgttgtataacttggagacacttctcctgtcatcttgtgatgatcttgaggagctaccgcttcagatggagaagttgatcaacttgcggcaccttgacatcagcaacacttctcgcttgaagatgccgctacatctgagcaagttgaaaagcctccaagtgctagtgggagccaagtttctactaggtggcccctgtggttggagaatggaagatttgggtgaagcacattacatgtatggatctctatcaattttagaattgcaaaatgtggttgatagaagggaagctcagaaggcgaagatgagggataagaagaagaatcatgttgagaagttatcgttggagtggagtggaagtgatgcggacaattcacaaaccgaaagagacatacttgatgagctacgtccacacacaaaaataaaagaagtcgaaatctccggatatagagggacacagtttccaaattggctagctgatgattcgtttcttaagctgctagtacaattgtctcttagcaactgcaaggactgtttttccttgccagcactaggacagcttccttgtttgaaattcctttccattagaaagatgcatcgaataacagaggtgatggaagaattctatggtagtccgtcctctgaaaagccttttaacactcttgagaagcttgaatttgcagagatgcctgagtggaagcagtggcacgtactagggaacggagagtttcctgcacttcgggacctttcaattgaagattgccccaagttggttggaaatttcctcgagaatctttgttctctgacgaaattgagaatctcaatatgtcctgaactcaatttggagacacccatccaactttcaagtctaaaatggtttgaagtttctggttcttttaaggctggatttatttttgatgaagctgaactgttcaccttaaatattttgaattgcaactctcttacctccttgcctactagcactctgccgagtacgttgaagacaatatggatatgtcgttgccggaaattgaaattggaggcaccagatagtagtaggatgatttctgacatgtttctggaggaattgagactggaggaatgtgattctgtatcatcaactgagttggtcccaagagcacgcactttgactgtgaagaggtgccaaaaccttactaggtttttgattcctaatgggactgaaagactcgatatttggggttgtgagaatcttgaaatattttcggtggcatgtgggacccagatgacgtttttgaatatccactcttgcgcaaagctgaagcggctgccagaatgtatgcaggaactccttccatctcttaaggaactgcatctgtggaattgtccagaaatagaatcctttcctgatggaggattgcccttcaatttacaactcctcgtgatcaactattgcgagaaactggtgaacagtcgaaaggagtggcgtctacagagactccattctctcagagagttgttcatccgccacgatggcagtgacgaagagattgttggtggtgagaattgggagttgcctttctctattcaaaggcttaccatagacaatctgaaaacattaagcagccaacttctcaaaagcctcacctctcttgaaactctagattttcgtaatttacctcaaattcggtcactgctagaacaagggcttccctcctctttttctaagctatatttatacagccatgatgagctccattcactacaaggtcttcagcacctcaattcggttcaaagtctattgatctggaattgccctaatctccaatctcttgcagaatcagcgttgccctcctccctctctaagttgaccatcagggattgccctaatctccaatcccttcccaaatcagcatttccctcctccctctctgagctgaccatcgagaattgccctaatctccaatcccttccagtaaaagggatgccctcttccctctctatactatctatttgcaaatgcccatttctcgaaccactcctagaatttgacaagggggagtactggccagaaattgctcatattcctgaaatatatatcggtcgcactatgt

SEQ ID NO: 257 - DNA, 18284 bp, Solanum tuberosum
  source 1..18284: mol_type = genomic DNA
tgcgcaattcttactgttttataccttttctccctctcttcctctccatcattttcagccttatggatattattgttatgttcctcatgagtatcaacatgcatattcttttctccaaattgttgttcatctcttacaatattattatcataaatttcaccaacattcgtatgatttcggccatttgcttctagaccttttatcgatttctccctttgtattttttctctcaatacaagttgccataagtatttcacaatttccttgttgaatggattttccaagcaaaaataagctccattttccaaagcgttcttggctaagagtctattgagtttatcacctacaactgcataattatattgagaagttaaaaattaaaattaaattatatcatacattatgagaatagttaatttcacacatatatttactgaattttatctgttatgacaacaactttgttatgaaacaatcatttatcatataactataactaaaaacaagattaacaatggatagatgtcgtctcttgacaatagattaacgataaattttatagctaattatatttttgtggtgtattaattgaaacaactgactttacccaatatttataacaagaagtgaaaaatagaattataaatacttaccaagagagattatatttaaggttacagcttgtgtcaagagttcaaaacaatgtaaatctgatgaattgacatcgattatcatcatgtcaatttttttcttttctttggagagcattgacattgccgcaggagtcgtaactgtcgtaactgtatatatccatacattttaaagttaaagttagtgaagaacatgaaaaaaatattatacacaaagttatcatttggatatgtttatttaatttctcattcaaattcaattatgaaatttcatattatgttgctatactttaatttatgaaataacacatattaatcaacttatatcgtaaacggtgtgtgtaatgacccgaaaggtcattttggtaatttttcgtggaaatgactattttgccctttcggtagttgccccgagtcccatgttttatggttgtaaagttagtttgaggaaaagttggtaaaaagttgagtttttgagaagttgagtttttatgagttaaagttggttaaaaagtgctttttcgagttatttggagtttcgggactcggattgaatttccgtcgattccggcaattttagaatgtcgaaacgggtctgtgtgaagttacggagttgaatttggagttgaaacgaagaattgaggtcctaagttgctaaagttgtgaaattgtgataaagagttgactttggtcaacatatgaggttccgaggctcggattgaaattccgaaagtaccgttggtttcgggaggcgattctaagtctagaatgagtcttggttgaatttttagacgctctgtttgagtttcgaattttttttgcgttaaactagtttcttggcatcttattgaatttcgggtcaaggagtcctcgaattcaaattccgacggttccattgagtccggaacgtcgaatttagtgggggtacatatttagtttgtgtgcacgagattccgaacgaatcccgagggtccaacggggacttaaactttggtgttattgttgtgtttcagctgcaatagcagtcctttttaagtcaaaaaacagtagccattttcccccaacttgaaaaatatccatttctacatttttagactttgagagctcgaaaataggtgatttcaagtgggttttcacaaggaattcattgggtaagttatttccaacttatatctttgatttccatcgattatttatggattttaacatcaaaatttgagatcccaactgaaaaatttgggggtttttgcctagtccgaatttaatagaaaatttgagtttgtgaactcatttcaactcctttttcgaaacggttttcactattggattctaaatttcttggggaacatttttcactaaaaatttccagatttcgagaatattttttcggaacgagttttttttgaccattttacccttttctccaaatttcacgatattggtgttgttagattcgtattgattgtgagattccatttatgaatagattgtggtgatttggagcgtgctcgaaagggtaaaactcaaatttgagttactagttgaagtgttttgaggcaagtgacttctaaactttgttaaactcttagactacacatgactactttcctaattgtgttggggagtaatggggattgaggatgggttttatttgttgattgaaattgttgtaaatgaaagatggggaataaaacgagctaagtgtgttatatgtgacttgaatttgttgaataagtcatgtgataaccgatattgaggggatagaagagcatgagtaagctatgattgatacagacattgatgttgagacagatgatgtgtaatactatgatatggttgtgattgagacagacgatgtgtaatactatgatgtggtcgcgatatggttgtgattgagacagataatctgtaatactatgatgtgatcgtgatatgattgtgattgatgacatgtgcatattcattattcatctcatgtgtgaactatctgttgcatgagttctgagacactgatatgaggatggatggctatgagacacagttgagactagctccggctagagatatatgagatggactagctccggctagcgatttggatgccgatgggatctggttccggcggtgatacatggtccatgtgtggcccccatgggttctgatttgagtattcagcgcggactgattacgtcaacagatatgtatcgtaggacagacatgcatcatgactatatgacattattattgcatttgcatcgcatttgacttcatctttgtctgtggtgtgtggagtttacctatttgcccctcttcatgtgatatatgatctatttgctcttacatgaggatatgaggttgatgttgagacactgttggatatatctgttgattatgaattgtgtagtataggttgttggttcgctgttagaatgaagtctcggtggttcggttgggattgaaaggagttgtttgtagctgctagtttagcttagtttagtgttacttgcgagtacctgttgcttttggtactcacccttgcttctacacagtggtgtaggttgacagctctatcagattcgacttattactcatcttcaaattagagcttccagacttacttgagaggtagcggttcattccagacgtgccctcaagttatctatatttattgttttgttctattatagaactttactatgagacttgtatattttattcagattccgtactagaggtttgtacatgtgacaaccaattctggggtttcattgagtttatttaaagacttccgcttatctttctatcttattcttgttttattaattccgtatcgtcgggtttttgggtgttaggcatcacatccggttttggagtgtgacagtgtgtgcaatcttactaatatataatattactttagagtaactaactgtaggaatatataatagagaagattctataggaataattctaaagaatacattctaatttattctttgacttgttgaaaacaaataaacactgaatatatattagattaaatactattaaagcaagatataataggataaaaagttttaagataaatttatgtaaaaagttttaaggttattttatttcataaataagtaacgagagtttaggagatttaacaaattattagaaaggagttaccaaaattatgttgaaaaggtttaacatagcttgattaaggaacaatcgatattaaatactaacaaagtaattgaaaatgaaacaaaaataaatgaggaaaaaatcacatgaaaagatttttcttttcttgtctacatctaataaaagacaaaaaagaaattgaagaaaaaaatcatgaaaatcatatgtccctatttatttgtttgtctacatcgaataaaagacaaaaaagtcatctcagataataatgatagtcagatcatctcttatcatgtctttatctcgctcctctctgttgggttctaaagggtgattagggcttgcaaataatatgattgataaattagttgacaaaaacttatactaaaaactaatattattatatgaaaactaatataaagaaaaatattaaaactgttgagagattaaatctccccataaacaaaactcactaaacgactacattgtggattctattatgttgtgctatgagaatagggatcttcaatttatagatctccaaatttttcctctaaggaaagaataaaccaaatatggaagaaaattatatttttcttttagaaaaagttcaagcatttatggtaatactttgacttttctttaaagaaaaaataaacttcaaataagataagaaaatcagggcaaaaccctaacactctcttcgatcccttactcttattttgtgcctcaatcatccaagtgaatttgttttctttctaaaacgatatatagatttgcaaaaatcaaagatctgtaatttcaaaatcatttatgagggacctaattattttctcctccaacacgatgtcactctaggccgattgacaaagaataagtttcctttttattttttgtacaaaaaagtcaagtgtgaaataattaatataaacttaaactacctcctttatggaaaaatatccgataaaattagaacaacacatactttaacataaaattattgaacctcttaaaaattacacaatcgttatggagaaagctaatcgagtatgtgacatggttataacaaaaacaaaaatggagaatctaatttaattccttataatcatacaaaattcatttattaacttgtaaaacaacatacacaagcatagaaataatgttatgataacaaggaaaggaaaagttctcaataaacatcatatcaattaattctctctatatataatgaaagtcagacagaaattagttctagatatatcacctttgtatccattgaactctagtaaatcaaccattggattagaaaccaattcctcatcttgatataccagcaacacagaaacctcttcagtcaaatcataaaaaggttctgtcattagattaatttgaatttgtaagaaaaacacttacaactgaagctatttataaagtatcatttactggcttatgagcctgtttagagataattatatataaataattttatctaaatatctagataatccctcaaatttgacacaaattgtaatttagatacttgaatttatctaaaagagaccaaataaatacttttactattgtcatatacgcactcatgaacaccttatgctgacatggcaaatttatgtgtattgtaaatgcttgtgttattacattattgaatcacaataaaaagattatttcttaaaaaaattaaatttttgattgacttttattccaacaatcaaattatacaacttggggttcattaactatttctattaatatcaaaatttaacattgattattggatattatttgaagttattgaagatgacattatatttattaagtattaattacacttcttgaatagttggaagattctttgatttgtgtccataattcaatagttcaaatggtgaatgtcttgtcttcaagtaacggctaatggtcttagaattaggccttatttatttttgttcggataaattagcccagagatattctaaatagagtatgatattgtgcactttgaccaagttagcataattttttttttttcaaaaagtctcacacattatggaaaaattacgcgagttggcaaatactactaggttattagtcattgagggtagggtatagtttaatttatttactgtcagtaaatacagtttcagtttttttgccattaataatgagacccaccacctctttgtatacctgtcacaccccaaaatcggatgtgatggcacgtgcccaaaccccaccggacacgtcagcctaacacccaaaaacccgacgatacgaaattaataaaacaagaataagatagaaagataagcggaagtctttaaataaactcaacataaccccagaattggttgtcacatgtacaaacctctaatacggaatctgaataaaatatacgagtctcatagtaaagttctagaatagaacagaacaataaatatagataacttgagggcacgtctggaatgaaccgctacctctcaagtaagtctggaagctctaatctgaagatgggtaataagccggatatgacagagctgtcaacctacaccactgtgtagaagcaagggtgagtaccaaaagcaacaggtactcgcaagtaacactaaactaagctaaactagcagctacaaacaactcctttcaatcccaaccgaaccaccgaaacttcattctaacagcgaaccaacaaccaatactacacaattcataatcaacagatatatccaacagtgtctcaacatcaacctcatatcctcatgtaagagcaaatagatcatatatcacatgaagaggggcaaataggtaaagtccacacaccacagacaaagatgaagtcaaatgcgatgcaaatgcaataatgatgtcatgtagtcgtgatgcatgtctgtcctaagatacacatctgttgacgtaatcagaccgcgctgaatactcaaatcagaacccatgggggccacacatggaccatgtatcaccgccagaaccagatcccatcggcatccaaatcgctagccggagctagtccatctcatatatctctagccggagctagtctcaactgtgtctcatatccatccatcctcatatcagtgtctcagaactcatgcaacagatagttcacacatgggatgaataatgaatatgcacgtcatcaatcacaatcatatcacgatcacatcatagtattacacattatctgtctcaatcacaaccatatcacgaccacatcatagtattacacatcatctgtctcaatcacaaccatatcacgaccacatcatagtattacacatcatctgtatcaacatcaatgtctgtatcaatcatagcctactcatgctcttctatcccctcaatatcagttatcacatgacttattcaacaaattcaagtcacatataacacatttagctcgttttattccccatctttcaattacaacaatttcaatcaacaaataaaactcatcctcaatccccattactccccaacacaattaggaaagtagtcatatgtagtctaagaatttaacaaagtttagaagtcacttgcctcaaaacacttcaactagtaactcaaatctgagttttactcttccgagcacgctccaaatcaccacaatctattcataaatggaatcccacaatcaatacgaatctaacaacaccaatatcgtgaaatttggagaaaagggtaaaatggtcaaaaaaaatctcgttccgaaaaatattttcgaaatctggaaatttttagtgaaaaatgttccccaagaaatttagaatccaatagtgaaaaccgtttcgaaaaaggagttgaaatgagttcacaaactcaaattttctattaaattcggattaggcaaaaaaccccaaattttacagttgagatctcaaattttgatgttaaaatccataaataatcgatggaaatcaaagatctaagttggaaataacttacccaatgaattccttgcgaaaatccacttgaaatcacctattttcgagctctcaaagtctaaaaatggagaaatgggtatttttcaagttggggaaaatggctactgttttttttgacttaaaagggctgctattgcagctgaaacacaaccataacaccaaagtttaagtccccgttggaccctcgggattcgttcgaaatctcgtgcacacaaactaaatatgtacccccactaaattcgacgttccggactcaatggaaccgtcggaatttaaattcgaggactccttgacccgaaattcaataagatgccaagaaactagtttaacgccaaaaaaattcgaaactcaatcggagcgtctaaaaattcaaccaagactcattctagacttagaatcgccccccgaaaccaacggtactcttggaatttcaatctgagcctcggaaccttatatgttgaccaaagtcaactctttatcaaaatttcacaactttagcaacttaggacctcaattcttcgtttcaactccaaattcaactccgtaacttcacacagacccgttttgacattctaaaactgccggaatcgacggaattccgatccgagtcccgaaactccaaataactcgaaaaagcactttttaaccaactttaactcataaaaactaaacttctcaaaaactcaactttttaccaacttttcctcaaactaactttacaaccacaaaacatgggactcgaggtaactaccgaaagggcaaaatagtcacttccacgaaaaattaccaaaatgacctttcgggtcattacaataccgaatcaacaaagccttcatcggcctttatttatgattttatacaaaatcaaatttatctctcatctcctctcctctcctcatttcctatttttctcctaaaataactctttcacttccaatttgaaattcgaatttcactttctccctccagtcgtgttttactttttgcaggtaaccgcctaaatcataggtgaacctcttttttttttttttttcatttttcaattgtatatgtattgtgcttgttagtgtttggataattttttctcaaaattccctcattacttattagataatcatttttatagaaaataaaatggatgattcgactagaggattatgagaggtacgtcattgcatgtcaaagtttttaataatcaaccttcattttcactctgtttaactcaagattttggagtcaatgcagggtctatggaaaaatctaaacaaattctagagtaaaaatctattgaagaattgagatccaagaaaaaaatgacccaattgcacttccagaagtcatcaacaatgtcaaggcaagcgacattaaaattgttgaaggagaaagtaagaggaaagccaaagatagtgattctgaggaggttgtgtctccttcattagatcaagacaaatacgaagaacatcaggtatttgcttaaaacacaattgtatgtagatatttgtatattttgttagtgatatacaaaattgtatgtagtatatgtatattttctgcttacatcacaattgtatatagatatttgtatattttgttagttatatacaaaattgcttgaagtatatgtatattttttgcttaaatcataattgtatatatatatttgtatatcttgtaagttatatacaatagtatgaattaaacaatatacaaaccttacattattatatatacagttaggttacaccaaaaattatcaaattaaagcacaacttttttatcgaatcatatacaattcatatatataattgacttagtaattttatacaactacttacacttatacatggtataagaattttgcacaattacttacatatatacaatattatcaattaaacaatatacaaatcgtataacttatatatacagtaaaattacaacaacaacaacaaaaattatcaaattaaagcacaccgttgttgtcgaatcatatacacttcatatataaaaattgtgtcattcaatttttcgaacaaaaaattagaattgaattggtaataaaaaatttatctaatcttgtataaacaaaattaaattattgcaaaccattagaatgaaaaaaacaaaaataatccgttttccaaaatttcaattatatactatacaaatcaattgtatactttcttgctgttcaaaacatgaagtttccttgaaagaaacgcttacctagcgttgaatatacaagaatattgattaatcttatgcttcagtcgtttgaggaacccagttgttatggtgtttctattgctatagaactcctttttggaaaaatatttgattttggacgattagcttgaacattgggactatataaattttttattaccgtatttagcactcatgtatccatttattaaaaaaaaatgtataaattatatttttaaaagaaaatatacaaaattaatgcttcatagcaaactaaactatgcccattgaatgtaattactaaactatacctatagagcgttatttcattaaatacgtttatcatatatgaaattttcccttaagagatcctacaccttatatatagcttctcaaatgtggaaattcaatctcacacccaacaatctttccctcagactaagtttcatggcccaatatcacaatgatccacgagtcaattcatgagattcactatgtgcatcacccacatcgtctaagtattttatggcaatcaagccctacaactagcttcttctttatatatatatgtgtgtgtatatgtgcgcgcgcgcgcatctctaattaatctcgtaaagggattaaggggccaatttcaaagaattaggcgattttcttagtttttcgtgtgtgttaacccataaatattttggtgatatggttttcggacgatttcttttgtgcaacttatatggaacccttcgtagggagttagtctcacactttttagagtccattttgggcactcaggggctaatttataggaaataggtgatcttctcagtccgtctgtattagcccatgaatattttggtgatatgtcttccgaataatttctttgtaaaatctttacgggaccctccatagggagttaatggagcagtacgtatagtctcacaattttagagttcattttgggcatttaggggccaatttacaggaattaggtgactttctcagtgttttgtgtgtgttagcccattaatatttggtgatatgactttcagacgatttctttgctacacatttacgaaaccctctgtagggagtcgggggagcagtacgtacaatctcacaattttagagtccattttagacatttaggggccaatttaaagaaattggacaattttctcagtttttcgtgtctgttagccattaatatattggtgaatatgacctacggatgatttctaatagaaatctttacgaaaccttcaatagggagttgggggagcaatacgtaccgtctgacaatttttagagtccattttgggcatttaagggccaatttacaggaattagacaattttctcagtatttttccatgtgttagcccataaatattttgttgctttgacttttagagtctaaacttctcatgtatattaagagatatttatgcttggttaattgaatcgaactaggaatagagaaattcctacttggatcttaatatttctctctctttgatttggaaaattctacgaagttgctttcaatggaattaaaatcataaatctattgtatgtaagaaacatacttatattcatgaatagatatgtgtagggtctaataatgaattatcacaattttttctactttttcctgtcagagtcctgctttttctttttctttttcttttttaactttggtctctgcttttgtctacatgatgataaggttggtggacctagctggaaatgtgatggaaatagctagtaaaagaaagaactttgcattttctgttttcttaaaaactgaaaaattacataacttgtggcaatttgttcattttcatactgagagatatttctattttttggatatatggcttatgctgctgttacttcccttatgagaaccatacatcaatcaatggaacttactggatgtgatttgcaaccgttttatgaaaagctcaaatctttgagagctattctggagaaatcctgcaatataatgggcgatcatgaggggttaacaatcttggaagttgaaatcgtagaggtagcatacacaacagaagatatggttgactcggaatcaagaaatgtttttttagcacagaatttggaggaaagaagcagggctatgtgggagatttttttcgtcctggaacaagcactagaatgcattgattccaccgtgaaacagtggatggcaacatcggacagcatgaaagatctaaaaccacaaactagctcgcttgtcagtttacctgaacatgatgttgagcagcccgagaatataatggttggccgtgaaaatgaatttgagatgatgctggatcaacttgctagaggaggaagggaactagaagttgtctcaatcgtagggatgggaggcatcgggaaaacaactttggctacaaaactctatagtgatccgtgcattatgtctcgatttgatattcgtgcaaaagcaactgtttcacaagagtattgtgtgagaaatgtactcctaggccttctttctttgacaagtgatgaacctgatgatcagctagcggaccgactgcaaaagcatctgaaaggcaggagatacttggtagtcattgatgacatatggactacagaagcttgggatgatataaaactatgtttcccagactgttataatggaagcagaatactcctgactactcggaatgtggaagtggctgaatatgctagttcaggtaagcctcctcatcacatgcgcctcatgaattttgacgaaagttggaatttactacacaaaaagatctttgaaaaagaaggttcttattctcctgaatttgaaaatattgggaaacaaattgcattaaaatgtggaggattacctctagcaattactgtgattgctggacttctctccaaaatgggtcaaagattagatgagtggcaaagaattggggaaaatgtaagttcggtcgttagcacagatcctgaagcacaatgcatgagagtgttggctttgagttaccatcacttgccttctcacctaaaaccgtgttttctgtattttgcaattttcacagaggatgaacagatttctgtaaatgaacttgttgagttatggcctgtagagggatttttgaatgaagaagagggaaaaagcatagaagaggtggcaacaacatgtataaacgaacttatagatagaagcttaattttcatccacaattttagttttcgtggaacaatagaaagttgtggaatgcatgatgtgacccgtgaactctgtttgagggaagctcgaaacatgaattttgtgaatgttatcagaggaaagagtgatcaaaattcatgtgcacaatccatgcagcgttcctttaagagtcgaagtcggatcagaatccataaggtggaagaattggcttggtgtcgtaacagtgaggctcattctattatcatgttgggtggattcgaatgcgtcacactggaattgtctttcaagctagtaagagtactagatcttggtttgaatacatggccaatttttcccagtggagtactttctctaattcatttgagatacctatctttgcgttttaatccttgcttacagcagtatcaaggatcgaaagaagctgttccctcatcaataatagacattcctctatcgatatcaagcctatgctatctgcaaacttttaaacttaaccttccatttcccagttattatcctttcatattaccatcggaaattttgacgatgccacaattgaggacgctgtgtatgggctggaattacttgcggagtcatgagcctacagagaacagattggttttgaaaaatttgcaatgcctcaatcaattgaaccctcggtattgtacagggtctttttttagactatttcccaatttaaagaagttgcaagtatttggcgtcccagaagactttcgcaatagccaggacctgtatgattttcgctacttatatcagctcgaagaattgacatttcgtttatattatccatatgctgcttgctttctaaaaaacactgcaccttcaggttctacgcaagatcctctgaggtttcagacggaaatattgcacaaagagattgatttcgggggaactgcacctccaactttactcttacctcctccggatgcttttccacaaaaccttaagagtttaacttttaggggagaattctctgtggcatggaaggatttgagcattgttggtaaattacccaaactcgaggtccttatactatcatggaatgccttcataggcaaggagtgggaagtagttgaggaagggtttcctcacttgaagttcttgtttctggatgatgtatacattcgatactggagagctagtagtgatcactttccgtaccttgaacgagttattcttagagattgccgtaatttggattcaatccctcgagattttgcagatataaccacactagctcttattgatatagattactgtcaacaatctgttgtgaattccgccaagcaaattcaacaggacattcaagacaactatggaagctctatcgaggtccatactcgtcatcttttgtaagacatcttcttccttgctttacaacaataattaactcatcatcatagtaaactcgataataatctggataatagccttagtaagtcaaattgcaccaattcaacaaaagttcttgatgctgtcattgtgtttgatttgaatccttccaatattgtgtaacttgttatacttgcatgttcattcttgattttgggaagtgtaacatttcatttttcatcttttgtggctagcattcccaagagtgtgacaacagttgaagatgatgatgatagtgtgacaacagatgaagatgatgatgatgatgactttgagaaagaagttgcttcttgccgcaataatgtgtaagttcttatacctgcatgctcattcttgctataatgttctcttgttccttaattatgggacatctgacatattattttccatgttttgcgtcttttatttttctgcagcgagtagttaaggtgttctgaggactagccagttctctgaaataaatgtcaaatcagaagccaaatgtgtgagtgtttgttttgttcgttttcattttttctgcataaggtggcaggatgattgcaaatggcttgtaatttaattgtatatgatctttcgtatagccatttgtcagtggttcttaagatactccaaattttatgcacatacatacatactgtacaggccagaacagactccagtaacgtgtgtttcctttcttgggagtcctcaatctacctcgcaaaggctaaatccagtggcaccagctttattactaaaacattcacacgggaacagttgagaaaaactaggcctccataccaaacacacccttaaacttgagctggttgatagagactagagagtagagagcactacatggattatggacctagctaaaagaaagaccttttgtttgaagataagcttaagaaattcgcacactctctgtcaccttgacacaagtgttctcctcgaccccaactaataatgtatgatcacaaatttcctgtcttttttttaaactttggtctcttcttttgtctacatgatgataaggttagtgacctcgcatctttctactttatcctgttagtggacctagctggaaatgtgatggaaatagttagtaaaagtaagatctttgcattttctgttttcttaaaaactgaaatattacataacttgtggcaattaatttgtccattttcatactgagagtgagagagtcctattttttggatttatggcttatgctgctgttacttcccttatgagaaccatacaccaatcaatggaaattattcaatgtgatttgcaaccgttttatgaaatatgttttttgacttacaaacattgaattaaaatcttttgaacttttataaattaagatttttttcttttaaagaaatcgatactgtaatcctctatatcaacgagcttactcatgtgaaggtcaagtgataaaaccaggggccagagccagtctagacctagggggttcggagcttttgtaattggatcattgtgattacgggttgaatgtctaattttctaggcgattatgatagtattttgtatctgaataatagctcactttttctaagtaatggaaaagaaggtcaaaacgtgccactaaaagacttgactaagacaaaaatgggttgtcaagaacgtagaggagggtaggatggacagttggtcagatctagtatggataatacatggaggtagttggagtggcggctctcccaaaattctgtcatcttagatctttggattcggtcttatacatatgtgaggaaggtaatgaaaaatattggggtagaggattacaacatggggaatcaagatttcagatggtcagtcaactaactgagctactaagatttcaaaaaaaagaaaaagaagggttccatgtgacatgaaagtctcatattgcatagtttttgaatgaggcaaagaagtgaggaatcagatgaaccaccttcgatggaaaattatactatttatacatatagttaaaattgttttctatctttatattattgtagtcagctaatttgcatgtttacttattcatattttgaatagacataatacataaatacatcctttaacttggcttcaaatcaaatttatgcccttcaactttggatgtgcacaaatagacatttaaatttgtataaagttgaagaaatagacacacatgtcctacatgacatcctacatgtcattttttatcctacgtggtgtcttacgtgtattgtgtcatgtaggactcgtgtggctagtcgctcaactttatacaaatttaagtgcatacttgtgcatacccaaagtcggagaacataaacgtcaaatgaggtcaagttaaagggcacatttatgtattatgccttcttgatttcattaataatgaaaatcctgaatcatattcagattccgtcactaatcgttgaattaatatactatgtattatttattggatttttttgctatcttatttttaattgttcaaagttttgtttattatctttagcataatatctgattatattattttgatatactttttctagccctaattacttgtccatttttgaattgacacacctattaagaaaacaattattgaaatagtgagtttactattttacccatattaattatgaagtgggtgatttaaaaactcaagattttcaaaaagttctacttttttcaaagtaataaattaagggtataatatgtaaaaaaaattattctttcttgatttgtcaaaatagaaaagtaattaggaataactaaaaaaatggataaataattaaaaacggagggagcaatatgttatctttagcctaataatatctgattaatggccaccctaattgattggataggagaggatagacttgcttccaagtaagccaaaatataaaaagttgacaaaagggtgctaaattcgagacacatgtagtacttatataattcatgtgcggactcgttcttttgtagtactccttccgttctattttatatgtcatatttttattttatactttcattaagaaatgatgtaattttatctttctattcttatttaatgtttttttaagtcaattttataataaatgatgaatatattttcaagattaattaactactctatcaagggtataataggtaaaatatggtaatttatacataaattttataaaatgacaagtattgtggtccaactatttatagaaagagatgacatataaaatgggacggagggagttataaagttgacttaagaaaacatttaataagggtagaagggtaaagttacattatttcttaatgtaaatgtaaagtaaaaatgtaacatataaaatgggaaggagggagtagtattttctcgttttattttacgtggcactctattctcataatctatctttaaaaatgtcattttattgtaattgaaaataatttaacttaaaattctccatctacccttaattaatgaaatgatttacaattatataaatatataaaaattgttttagcttataattttctaaaatctttttttctcttatacatcgtattaagtcaaacaatactaagtcaaatggaatggcggagtatttcttttattttttttcacaccgtccatatgttttctcccatcccccagacccccactatgtatattcactccttagttgaatctgaatttagagtttagaagctt

SEQ ID NO: 258 - DNA, 396 bp, Arabidopsis thaliana
  source 1..396: mol_type = genomic DNA
atgtctacaccatcaggttcaaatccgttaccaatggccgacaagttagaagcaaaaggtcgtatagcatccatcaagttcgactatgtcaagaatggtcaacctaaagctggatcaacccatggtgtctcatatcacaatttcaccgagtggtttgatcttaaccatacatgcgatgagcatatcttatctgtgaagtgttactacgatgatggtgagatacaaggacttgtgatcaaaaccaatatcaggacgtctgcatatatgggatataacattggtactacgtttacacttgaagtcaaaggcaagaagatcgttgggtttcatggatcttttgataaaaaccttacctcgcttggagcttatttcgcaccgctttctcctgctaagtaa

SEQ ID NO: 259 - DNA, 978 bp, Pepper mild mottle virus
  source 1..978: mol_type = genomic DNA
cacaaacacgtttttattccggctgtgtagtctttcaacgttgtcttccgatgcccgtgtttccaaacttcagccaagaaatcgtctaagcctaaccttttccaaatctcatactcgactgcacaatgaaattcgttctgtgatttgtcatacttggaaatgtctagctctaatatgtccataggaacattagagtccagatctgagaaaaattcttcgatctgtgtaggcgttttccttgtataaaacatgaatcttgaactgtcaattgtctctagcagctgtcttgttaattctgaaaatacaggaccaaaaagcgcattgattttcttgctatgatacacaatagtttgcaaagccgggtattcagtttgaatactaagatccaaacgctgtttcggctgctgcttgatcatgtgcctgtattgatcaacggctggtaaatcaataaagtcaaaatcagccaactggccaattgttgacttctcttgcttttcgatccatctttccaaactcgcccttgaaagcagaggtatattttttggttttttcttttctttaattaagtatgcatcaaaaaacttatctactactagagaagcggtgtcttcgatgtcaacaacccctactaattcgggagagttgaaatttcttttgatcatcgcgaccaaattttccaacaatccaggttttcgaggtttttcagcagcagtcctgatcacaggtttcaatgtcgtctcagattctctcggaagaggcaccgatttcgacatatccaacacacaatccttgacattcaaactattctctcgtatttgcatagttacagcatcatactcattgagtatagtactgtttcccggcaaacacttgtcgtaataatattgcatgtcagaaacatctcctgtttttggtgctgcgacgaaaaggttaacacctttgtacaccgattctatctgtaattgctattgagtcgac

SEQ ID NO: 260 - DNA, 2370 bp, Bacillus thuringiensis
  source 1..2370: mol_type = genomic DNA
atgaacatgaataatactaaattaagcgcaagggccctaccgagtcttattgattattttaatggcatttatggatttgccactggtatcaaagacattatgaatatgatttttaaaacggatacaggtggtaatctaaccttagacgaaatcctaaagaatcagcagttactaaatgagatttctggtaaattggatggggtaaatgggagcttaaatgatcttatcgcacagggaaacttaaatacagaattatctaaggaaatcctaaaaattgcaaatgaacagaatcaagtcttaaatgatgttaataacaaactcgatgcgataaatacgatgcttcatatatatctacctaaaattacatctatgttaagtgatgtaatgaagcaaaattatgcgctaagtctgcaaatagaatacttaagtaagcaattgcaagaaatttctgataaattagatattattaacgtaaatgttcttattaactctacacttactgaaattacacctgcatatcaacggattaaatatgtgaatgaaaaatttgaagaattaacttttgctacagaaaccactttaaaagtaaaaaaggatagctcgcctgctgatattcttgatgagttaactgaattaactgaactagcgaaaagtgttacaaaaaatgacgttgatggttttgaattttaccttaatacattccacgatgtaatggtaggaaataatttactcgggcgttcagctttaaaaactgcttcagaattaattgctaaagaaaatgtgaaaacaagtggcagtgaagtaggaaatgtttataatttcttaattgtattaacagctctacaagcaaaagcttttcttactttaacaacatgccgaaaattattaggcttagcagatattgattatacttctattatgaatgaacatttaaataaggaaaaagaggaatttagagtaaacatccttcctacactttctaatactttttctaatcctaattatgcaaaagttaaaggaagtgatgaagatgcaaagatgattgtggaagctaaaccaggacatgcattggttgggtttgaaatgagcaatgattcaatcacagtattaaaagtatatgaggctaagctaaaacaaaattatcaagttgataaggattccttatcggaggttatttatggtgatatggataaattattgtgtccagatcaatctgaacaaatttattatacaaataatatagtatttccaaatgaatatgtaattactaaaattgattttactaagaaaatgaagactttaagatatgaggtaacagctaattcttatgattcttctacaggagaaattgacttaaataagaagaaagtagaatcaagtgaagcggagtataggacgttaagtgctaaagatgatggagtgtatatgccgttaggtgtcatcagtgaaacatttttgactccgattaatgggtttggcctccaagctgatgaaaattcaagattaattactttaacatgtaaatcatatttaagagaactactgttagcaacagacttaagcaataaagaaactaaattgatcgtcccgccaagtggttttattagtaatattgtagaaaatgggaacttagagggagaaaacttagagccgtggatagcaaataataagaatgcgtatgtagatcatacaggcggagtgaatggtactagagctttatatgttcataaggacggaggattttcacaatctattggagataagttaaaaccgaaaactgagtatgtaatccaatatactgttaaaggaaaaccttctattcatttaaaaaatgaaaatactggatatattcattatgaagatacaaataacaatttagaagattatcaaactattactaaacgttttactacaggaactgatttaaagggagtgtatttaattttaaaaagtcaaaatggagatgaagcctggggagataactttacaattttggaaattagtccttctgaaaagttattaagtccagaattaatcaatgtaaataattggattcgcacgggatcaactcatattagcggttatacactcactctctatcagggaggaggaggaaatctaaaacaaaaccttcaattagacagtttttcaacttatagagtgaatttttctgtgaccggagatgctaatgtaaggattagaaattctagggaagtgttatttgaaaaacgatatatgagcggtgctaaagatgtttctgaaattttcactacaaaattggggaaagataacttttatatagagctttctcaagggaataatttatatggtggtcctcttgtacatttttacgatgtctctattaagtaa

SEQ ID NO: 261 - DNA, 2370 bp, Bacillus cereus
  source 1..2370: mol_type = genomic DNA
atgaacaagaataatactaaattaaacgcaagggccctaccgagttttattgattattttaatggcatttatggatttgccactggtatcaaagacattatgaatatgatttttaaaacggatacaggtggtaatctaaccttagatgaaatcctaaagaatcagcagttactaaatgagatttctggtaaattggatggggtaaatgggagcttaaatgatcttatcgcacagggaaacttaaatacagaattatctaaggaaatcttaaaaattgcaaatgaacagaatcaagtcttaaatgatgttaataacaaactcgatgcgataaatacgatgcttcatatatatctacctaaaattacatctatgttaagtgatgtaatgaagcaaaattatgcgctaagtctgcaaatagaatacttaagtaaacaattgcaagaaatttctgataaattagatattattaacgtaaatgttcttattaactctacacttactgaaattacacctgcatatcaacggattaaatatgtgaatgaaaaatttgaagaattaacttttgctacagaaaccactttaaaagtaaaaaaggatagctcgcctgctgatattcttgatgagttaactgaattaactgaactagcgaaaagtgttacaaaaaatgacgttgatggttttgaattttaccttaatacattccacgatgtaatggtaggaaataatttattcgggcgttcagctttaaaaactgcttcagaattaattgctaaagaaaatgtgaaaacaagtggcagtgaagtaggaaatgtttataatttcttaattgtattaacagctctacaagcaaaagcttttcttactttaacaacatgccgaaaattattaggcttagcagatattgattatacttctattatgaatgaacatttaaataaggaaaaagaggaatttagagtaaacatccttcctacactttctaatactttttctaatcctaattatgcaaaagttaaaggaagtgatgaagatgcaaagatgattgtggaagctaaaccaggatatgcattggttggttttgaaatgagcaatgattcaatcacagtattaaaagtatatgaggctaagctaaaacaaaattatcaagttgataaggattccttatcggaggttatttatggtgatacggataaattattgtgtccagatcaatctgaacaaatatattatacaaataacatagtatttccaaatgaatatgtaattactaaaattgatttcactaaaaaaatgaaaactttaagatatgaggtaacagcgaatttttatgattcttctacaggagaaattgacttaaataagaaaaaagtagaatcaagtgaagcggagtatagaacgttaagtgctaatgatgatggagtgtatatgccattaggtgtcatcagtgaaacatttttgactccgataaatgggtttggcctccaagctgatggaaattcaagattaattactttaacatgtaaatcatatttaagagaactactgctagcaacagacttaagcaataaagaaactaaattgatcgtcccgccaagtggttttattagcaatattgtagagaacgggtccatagaagaggacaatttagagccgtggaaagcaaataataagaatgcgtatgtagatcatacaggcggagtgaatggaactaaagctttatatgttcataaggacggaggattttcacaatttattggagataagttaaaaccgaaaactgagtatgtaatccaatatactgttaaaggaaaaccttctattcatttaaaagatgaaaatactggatatattcattatgaagatacaaataataatttaaaagattatcaaactattactaaacgttttactacaggaactgatttaaagggagtgtatttaattttaaaaagtcaaaatggagatgaagcttggggagataactttattattttggaaattagtccttctgaaaagttattaagtccagaattaattaatacaaataattggacgagtacgggatcaactcatattagcggtaatacactcactctttatcagggaggacgaggaattctaaaacaaaaccttcaattagatagtttttcaacttatagagtgtatttttctgtgtccggagatgctaatgtaaggattagaaattctagggaagtgttatttgaaaaaagatatatgagcggtgctaaagatgtttctgaaatgttcactacaaaatttgagaaagataacttttatatagagctttctcaagggaataatttatatggtggtcctattgtacatttttacgatgtctctattaagtag

SEQ ID NO: 262 - DNA, 2310 bp, Bacillus cereus
  source 1..2310: mol_type = genomic DNA
atgaaaaatatgaagaaaaagttagcaagtgttgtaacctgtaccttattagcccctatgttttttaatgggaatgtaaatactgcttacgcggacaacaaaatcaatcaggattcttcaaagcaggaataccaacagaaagagatggatcgaaaaggattgcttgggtattattttaaagataaagattttagtaaccttactatgttttcaccaacacgttataatacccttatttatgaccaacaaacagcgaataaattattagataaaaaacaacaagaatatcagtctattcgctggattggtttgattcagagtaacaaaacaggtgacttcacatttgaattatcagatgatgaatgtgcgattatagaaatggatgggaaagtgatttctaataaaggtaaagaaaagcaagttgtccatttagagaaaggaaaattagttccaattaaaattgagtatcaattagacgagccattaaatatcgatgatgaaaaattcaaagggtttaaattattgaaagtagataatcaaaaacaactacatcaagtacaacaagatgaattaagaaaccctgaatttaacaaaaaagagtcacaggaatttttagcgaaagcatcgaaaataaatctttttacgaaaaaaattaagagggacattgatgagggaacggatacagacggtgactctattccggatatgtgggaagaaaatgggtatacgattcaaaatagaatcgctgttaaatggaatgactcgctagcaagtaaagggtatacaaaatttgtttctaatccccttgacagtcacacagttggtgacccttatactgactatgaaaaagcatcgagagatttagatttgtcaaatgcaaaagaaacatttaacccattggtagctgcttttccaagcgtgaatgttagcatggaaaaggtgatattatctccaaataaaaacttatctaatagtgtagaatcgcactcatctacgaattggtcttataccaatactgaaggagcatctgttgaagctgggattgggcctaaaggtttttcttttggggtaagtgcaaactatcaacattctgaaacagttgcacaggaatggggggcatctataggagatactacgcaacttaatactgcgtcagcaggatatttaaatgcaaatgttcgatacaacaatgtgggaacaggagccatttatgatgtaaaacctacaactagctttgtattagaaaagaatacaatcgcaactattacggcaaaatcaaattcaacagctttaagtatatctccgggagaaagttatccgaaaaaaggccaaaatggaattgcgataacatccatggatgattttaactcacatccaattacattaaataaaaaacaattagatcaagtattgactaataaccctattatgttagaaacagaccagacagatgggatttataagataaaagatacacatggtaatattgtcacaggtggcacatggaatggtgtaactcaacaaattaaagcaaaaacagcgtctattattgtggatgacgggaaacaggtagcagaaaaacgtgtggcggcaaaagattatgcttatccagaagataaaacaccgtctttaactttaaaagatgcactgaagctttcattcccagaagagataaaagaaacagatggattattgtactataacaacaaaccaatttatgaatcgagtgtcatgacctaccttgatgggaatacggcaaaggaagtaaaaaaacaaataaatgataaaacaggggaatttaaggatgtccaacatttatatgctgttaaacttacacccaaaatgaattttactattaaagtaccggttgcgtatgatacagccaaacaggctgttaatcttggaggggataatccatggggggctaaaggattattagggacatgggtaaatgccatggttgtagataattccggagataaagcatataaaagggttgaacctggttatctactttcacctacattggagttttcagaaggttcattagacaatttaaagaaaaattatagtttttatgttagtatgtacgtgaaatcagataaaccatttactctaagaataaatgctggaccctatagtaccaagagaaccatagaagcatcaaatgattttaaacgcgttgatattcctgcgttttatatagaaggatttccgatagacactataagattagaaggttctgactatccatcggcaatatggtggaaagatgtttcaattacagaagtgtcagcagtaaaaaaataa

SEQ ID NO: 263 - DNA, 1389 bp, Bacillus cereus
  source 1..1389: mol_type = genomic DNA
atgaaaagaatggagggaaagttgtttatggtatctaaaaagttacaattagttactaaagctttattgtttagtacagttttatctatacctttattaaataatgaagaggtaaaagctgaacatttaaatctaaattctcaaagtaaatatcctagctttcaaaatcaaaaaatcactgataatgcagaggattttaaagaggataaggaaaaagcgaaagaatggggagaagtaaaagaaaaagagtggaaattaaccgctactgaaaaaagaaaaataaatgactttttaaatgatacaaacaaaataaaaacaaattataaagaaattactttttctatggcaggttcatttgaagatgaactgaaagatttaaaagaaattgataagatgtttgataaagccaatctctcaagttctattatcacctataaaaatgtggaacccgcaacaattggatttaataagtctttaacagaaggaaatacaattaattctgatgtaatggcgcagtttaaagaacaatttctaggaaaagatattaagtttgatagttatctagatactcatttaactgtccaacaagtttctagtaaagaaagagttattttgaaggttacagtgccgagtgggaagggttctactaatccaacaaaagcaggtgttattttagatggaaatgaacacaaaatgctcattgataatgggtatgtactccatgttgataaggtatcaaaggtagtaaaaaaggggctggagtgcttgcaagtggaagggaccttaaaaaagagtcttgactttaaaaatgatataagtgctaaagcgcatagttggggcatgaaaaattatgaagaatgggctgcaaatttaaccgattcccaaagaaaagctttagatggctatgctaggcaagattataaaaaaatcaatgattatttacgaaatcaaggcggaagtggaaatgaacaattggatgcacaaataaagaacatttctgaaactttaaacaataagccaataccagaaaatattactgtgtatagatggtgtggtatgccagaatttggttatcaaattagtgagcctttacctgccttaaaagattttgaatgggaatttttaaacacaatcaaggaagacaaaggatatattagtacgagcttatcaagtgaacgtctagcggcttttgggtcaagaaaaattatattacgattacaaatcccaaaaggaagtaaaggcgcatatttaagtgccattggtggatttgcaaatgaaaaagaaattcttctggataaagatagtaagtatcatatcaataaaataacagaagtagtcattaaaggcattaagcgatatgtagttgatgcaacattattaacaaattaa

SEQ ID NO: 264 - DNA, 1104 bp, Bacillus thuringiensis
  source 1..1104: mol_type = genomic DNA
atgaaaaatagattttcaaaagtggcattatgcaccgtaccgattttaatggtttctacattcgccagttcaagcatgtcagcttttgctgcagaagccaaatcaccagatttaaatgtatctcaacaagtaataggtccctatgccgaatcttatattgatattgtgcaggatagaatgaaacaaagggataagggatcaaaattaactggtaaaccaataaatatgcaagaacaaataatagatgggtggtttctagctagattttggatatttaaggatcaaaacaataaccatcagacaaatagatttatatcctggtttaaagataatattgctagttcaaaagggtataatagtattgcggagcaaatgggtttaaaaatagaagcagaaaacgatatggatgtaacaaatatagattatacatctaagacaggcgataccatttataatggtatttcagaattgaaaaattatacaggatcaactcaaaagatgaaaacagatagttttcaaagagattatacaaaatcagaatctacttcagtaactaatggattacaattaggatttaaagttgctgctaaaggagtagttgctttggctggggcagactttgaaaccagtgttacttataatctatcaactactacaactgaaacaaatacaatatcagacaagtttactgtcccatctcaagaagttacattgcctccaggacataaagcgatagtgaaacatgatttaagaaaaatggtttattctggtactcatgatctaaagggtgatttaattgtgagttttaatgataaagagattgtacaaaaatttatttatccaaattatagagaaattaatttatctgatatccgtgaaactatgattgaaattgatgaatggaatcatgtaaaccctgtgaatttttatgaattagttggggtcaaaaatcatataaaaaatggtgaaactttgtatatagatactccagctaaatttatgtttaatggtgctaatccatattatagagcaacatttacagaatacgacgggaataataatcctgttcaaacaaaggtattaagtgaaaactttaaattgtag

SEQ ID NO: 265 - DNA, 2862 bp, Spodoptera exigua
  source 1..2862: mol_type = genomic DNA
attgtgaagtgaaatgagatcataatatatttgtgtgtagcgatatttttattaagtagataaatttaaggaccataaatgaagaacctctaacaatttataatttgtgtaaaacataataaacagtttttaactgtgaatgtgcattaccgatttagtatgtgatttaaccccagtgataagagacttatcacttgctgttatttatataactttgatctgattacgaatcttaattaattacaaaatgtatatacatcgatcgactgtgttacgactgtgtgtgtgggtgagcctgttggctctatgtggggcccaacgcgcagagcaactcctggcacagaatccttgctccagcaagacgacgtgcagtgactgcatccgcacggccagctgcgcttggcgttttgcaggagagttcaatggccctcggtgcttcaaccctgccatggagcgagatggcactgcaggatgtgaagaatcctacatattcaacccagataataaacgctctgtcgaccccatgtacaatatggagttaagcagagctaagtctagaatgggcatgtctgctggttcatcttcttatgaagagtcttacagtgcacagggcagtagctttgctgcatcgggatcggcagcaggcgcaggcgctgaagcaggtggcgaaagattggtgcagatgaaacctcagaaagtgaatctcaacctcagaatgaatcaaatgcagaaacttacatttgcgtactccagagctcaagattatcctgttgacttatattaccttatggacttgagtagatctatgaaaaacgatagagagaaactcagtaccctgggaagtttactgtctgctaccatgaggaatatgacgtccatgttcaggatcgggttcggctcctttgtagataaactagtcatgccttatgtatctacagtgcctaagaatttgatatcaccttgcgacggttgcgcagcgccttatggataccaaaatcaaatgtctctgagtactgacaccgacttctttgagaaagcagtagctaacgcagacgtgccgggcaacttggacgcccccgaaggagggttcgacgcgatcatgcaagccgtggtgtgcaagcaacagatcggctggcgagaccaggctaggcgacttcttgttttctccacagacgctggtttccattatgctggcgacggaaagctcggtggtatcgtccaacctaacgatggcgaatgtcacatgaaggacaacacgtacacacactcgacgttgcaggattaccccagcatttcacagattaatcataaggtgaagaagcacgctatcaacgtaatctttgcggtaacggcggaacagatcagcgtgtacgaacagctgagcaagcacatcgaaggttccagtacgggagtgctgagcaacgattccgataacatcgtcgacctcgtccgggaacaatacaacaaaattacgtcaactgtagaaatgaaagactcatcgagtgacgctgtgcaaatagtgtattactcatcttgtctcagcggcaaagaactcacacagacgaacaaatgcgacggattaaaggttggcgatgtcgtggaattcacggctgagattacattgaaagaatgtcccaaagaccgcagcaagtggaagcagactttcgagatctcccccgtcggtatctctgacagcctcactgttgaactggaaatggtctgcgactgtccctgtgaacagcccaatcatcacgcgtacaacgacagtccgctagtatgcagcggcgagggcgtgtctgcgtgcggggtgtgcgtgtgccggccgggccgcttcggcaagaactgcgagtgctcggcgcacggcggcgtctccgccgagcaggagcgcggctgccgccccaccaacgccagcgccggcccgctctgctccaaccgcggcacctgcatctgcggcgtctgcgagtgcaacaagatggacgacccgctcaaggtgatttctggcccgttctgcgagtgcgataacttcacgtgtgacatgaacaaaggtttgctctgctcgggccccgaccacggggaatgtgtctgtggcaaatgtagctgtactcccgagtacaccggaccagcttgccagtgtttgaaggaccaaactccttgtcgatcacctgaaaataacgaaatatgtagcggtaacggaaaatgtgtctgcggtcagtgcgtgtgcaatgtagatgacgaccgtcattattccggaaaatactgtgaaaaatgtcccacctgcccaggccgctgtggtgaattcaaagactgtgtattatgcgaggtacacaaacgtggcccgctgtacaatgccgacacagacacctgtggcgactgtgcgctctatcccataatcgaagaaggcaaaattgaagccaacgaatctcgaaacgaacatttgtgtagtttctacgacgatgaagattgtttatatgtgtacgtgtactcctacaatgagaaccagcagcttgtcattagagcacagaaggaacgggaatgtcccaagaaggtaccaatcttgggaattgtgttgggagtgatcgctgcgatagtgttggttggtttggctttactgatgttatggaagatggcgactactatacacgaccgcagagagtttgcgcgcttcgagaaagaacgtatgatggccaaatgggacacgggcgagaaccctatttacaagcaagcaacatcgaccttcaaaaatcctacatatgctggaaaataattgtattacattacacaaaatagtcagcaaataaaatagtcgtctcaaaacgtaaagcaatcgaatgccgcatttataaaattatcaagatgtcagta

SEQ ID NO: 266 - DNA, 766 bp, Helicoverpa zea
  source 1..766: mol_type = genomic DNA
tgatttcgaattccatcgttcattccaagatgttcaatcaaactcagttgtttgtttttctcgctgtattcactacgagcagtgttttagggaataacaatgatgttaaggatggcgcagcgagtggagctcacagcgaccgactaggtctttggttcggtccccggctaggcaagcgctcgctcagaatatctaccgaagataacagacaagcattcttcaaattactcgaagccgccgacgctttgaaatactattacgaccagctaccttatgagatgcaagctgatgaacctgaaaccagggtcaccaagaaggtgatcttcacccccaagttaggcagaagcctcgcatacgatgacaaaagctttgagaacgtggagttcacgcccagactcggcaggagactgtccgatgatatgcctgccacccccgctgaccaggaaatgtaccgccaagaccctgaacagattgacagcaggacaaagtacttctccccaaggctcggcagaaccatgaacttctcaccacgactcggcagggaactgtcttatgatatgatgccaaataaaatcagggtagtcaggagtacaaacaaaacgcgatcaacataatttggagcaaaaacaagacgcaaagctagtctaacctcaaaatttttataaaacgtgttattttggacgaaataatgtactgttttgtataataagtattattaaataatattaaaaattagtattttgtcgaaataaaggacttaagatat

SEQ ID NO: 267 - DNA, 3468 bp, Bacillus thuringiensis
  source 1..3468: mol_type = genomic DNA
atggataacaatccgaacatcaatgaatgcattccttataattgtttaagtaaccctgaagtagaagtattaggtggagaaagaatagaaactggttacaccccaatcgatatttccttgtcgctaacgcaatttcttttgagtgaatttgttcccggtgctggatttgtgttaggactagttgatataatatggggaatttttggtccctctcaatgggacgcatttcttgtacaaattgaacagttaattaaccaaagaatagaagaattcgctaggaaccaagccatttctagattagaaggactaagcaatctttatcaaatttacgcagaatcttttagagagtgggaagcagatcctactaatccagcattaagagaagagatgcgtattcaattcaatgacatgaacagtgcccttacaaccgctattcctctttttgcagttcaaaattatcaagttcctcttttatcagtatatgttcaagctgcaaatttacatttatcagttttgagagatgtttcagtgtttggacaaaggtggggatttgatgccgcgactatcaatagtcgttataatgatttaactaggcttattggcaactatacagatcatgctgtacgctggtacaatacgggattagagcgtgtatggggaccggattctagagattggataagatataatcaatttagaagagaattaacactaactgtattagatatcgtttctctatttccgaactatgatagtagaacgtatccaattcgaacagtttcccaattaacaagagaaatttatacaaacccagtattagaaaattttgatggtagttttcgaggctcggctcagggcatagaaggaagtattaggagtccacatttgatggatatacttaacagtataaccatctatacggatgctcatagaggagaatattattggtcagggcatcaaataatggcttctcctgtagggttttcggggccagaattcacttttccgctatatggaactatgggaaatgcagctccacaacaacgtattgttgctcaactaggtcagggcgtgtatagaacattatcgtccactttatatagaagaccttttaatatagggataaataatcaacaactatctgttcttgacgggacagaatttgcttatggaacctcctcaaatttgccatccgctgtatacagaaaaagcggaacggtagattcgctggatgaaataccgccacagaataacaacgtgccacctaggcaaggatttagtcatcgattaagccatgtttcaatgtttcgttcaggctttagtaatagtagtgtaagtataataagagctcctatgttctcttggatacatcgtagtgctgaatttaataatataattccttcatcacaaattacacaaatacctttaacaaaatctactaatcttggctctggaacttctgtcgttaaaggaccaggatttacaggaggagatattcttcgaagaacttcacctggccagatttcaaccttaagagtaaatattactgcaccattatcacaaagatatcgggtaagaattcgctacgcttctaccacaaatttacaattccatacatcaattgacggaagacctattaatcaggggaatttttcagcaactatgagtagtgggagtaatttacagtccggaagctttaggactgtaggttttactactccgtttaacttttcaaatggatcaagtgtatttacgttaagtgctcatgtcttcaattcaggcaatgaagtttatatagatcgaattgaatttgttccggcagaagtaacctttgaggcagaatatgatttagaaagagcacaaaaggcggtgaatgagctgtttacttcttccaatcaaatcgggttaaaaacagatgtgacggattatcatattgatcaagtatccaatttagttgagtgtttatctgatgaattttgtctggatgaaaaaaaagaattgtccgagaaagtcaaacatgcgaagcgacttagtgatgagcggaatttacttcaagatccaaactttagagggatcaatagacaactagaccgtggctggagaggaagtacggatattaccatccaaggaggcgatgacgtattcaaagagaattacgttacgctattgggtacctttgatgagtgctatccaacgtatttatatcaaaaaatagatgagtcgaaattaaaagcctatacccgttaccaattaagagggtatatcgaagatagtcaagacttagaaatctatttaattcgctacaatgccaaacacgaaacagtaaatgtgccaggtacgggttccttatggccgctttcagccccaagtccaatcggaaaatgtgcccatcattcccatcatttctccttggacattgatgttggatgtacagacttaaatgaggacttaggtgtatgggtgatattcaagattaagacgcaagatggccatgcaagactaggaaatctagaatttctcgaagagaaaccattagtaggagaagcactagctcgtgtgaaaagagcggagaaaaaatggagagacaaacgtgaaaaattggaatgggaaacaaatattgtttataaagaggcaaaagaatctgtagatgctttatttgtaaactctcaatatgatagattacaagcggataccaacatcgcgatgattcatgcggcagataaacgcgttcatagcattcgagaagcttatctgcctgagctgtctgtgattccgggtgtcaatgcggctatttttgaagaattagaagggcgtattttcactgcattctccctatatgatgcgagaaatgtcattaaaaatggtgattttaataatggcttatcctgctggaacgtgaaagggcatgtagatgtagaagaacaaaacaaccaccgttcggtccttgttgttccggaatgggaagcagaagtgtcacaagaagttcgtgtctgtccgggtcgtggctatatccttcgtgtcacagcgtacaaggagggatatggagaaggttgcgtaaccattcatgagatcgagaacaatacagacgaactgaagtttagcaactgtgtagaagaggaagtatatccaaacaacacggtaacgtgtaatgattatactgcgactcaagaagaatatgagggtacgtacacttctcgtaatcgaggatatgacggagcctatgaaagcaattcttctgtaccagctgattatgcatcagcctatgaagaaaaagcatatacagatggacgaagagacaatccttgtgaatctaacagaggatatggggattacacaccactaccagctggctatgtgacaaaagaattagagtacttcccagaaaccgataaggtatggattgagatcggagaaacggaaggaacattcatcgtggacagcgtggaattacttctcatggaggaatag

SEQ ID NO: 268 - DNA, 3468 bp, Bacillus thuringiensis
  source 1..3468: mol_type = genomic DNA
atggataacaatccgaacatcaatgaatgcattccttataattgtttaagtaaccctgaagtagaagtattaggtggagaaagaatagagactggttacaccccaatcgatatttccttgtcgctaacgcaatttcttttgagtgaatttgttcccggtgctggatttgtgttaggactagttgatataatatggggaatttttggtccctctcaatgggacgcatttcttgtacaaattgaacagttaattaaccaaagaatagaagaattcgctaggaaccaagccatttctagattagaaggactaagcaatctttatcaaatttacgcagaatcttttagagagtgggaagcagatcctactaatccagcattaagagaagagatgcgtattcaattcaatgacatgaacagtgcccttacaaccgctattcctctttttgcagttcaaaattatcaagttcctcttttatcagtatatgttcaagctgcaaatttacatttaccagttttgagagatgtttcagtgtttggacaaaggtggggatttgatgccgcgactatcaatagtcgttataatgatttaactaggcttattggcaactatacagatcatgctgtacgctggtacaatacgggattagagcgtgtatggggaccggattctagagattggataagatataatcaatttagaagagaattaacactaactgtattagatatcgtttctctatttccgaactatgatagtagaacgtatccaattcgaacagtttcccaattaacaagagaaatttatacaaacccagtattagaaaattttgatggtagttttcgaggctcggctcagggcatagaaggaagtattaggagtccacatttgatggatatacttaacagtataaccatctatacggatgctcatagaggagaatattattggtcagggcatcaaataatggcttctcctgtagggttttcggggccagaattcacttttccgctatatggaactatgggaaatgcagctccacaacaacgtattgttgctcaactaggtcagggcgtgtatagaacattatcgtccactttatatagaagaccttttaatatagggataaataatcaacaactatctgttcttgacgggacagaatttgcttatggaacctcctcaaatttgccatccgctgtatacagaaaaagcggaacggtagattcgctggatgaaataccgccacagaataacaacgtgccacctaggcaaggatttagtcatcgattaagccatgtttcaatgtttcgttcaggctttagtaatagtagtgtaagtataataagagctcctatgttctcttggatacatcgtagtgctgaatttaataatataattccttcatcacaaattacacaaatacctttaacaaaatctactaatcttggctctggaacttctgtcgttaaaggaccaggatttacaggaggagatattcttcgaagaacttcacctggccagatttcaaccttaagagtaaatattactgcaccattatcacaaagatatcgggtaagaattcgctacgcttctaccacaaatttacaattccatacatcaattgacggaagacctattaatcaggggaatttttcagcaactatgagtagtgggagtaatttacagtccggaagctttaggactgtaggttttactactccgtttaacttttcaaatggatcaagtgtatttacgttaagtgctcatgtcttcaattcaggcaatgaagtttatatagatcgaattgaatttgttccggcagaagtaacctttgaggcagaatatgatttagaaagagcacaaaaggcggtgaatgagctgtttacttcttccaatcaaatcgggttaaaaacagatgtgacggattatcatattgatcaagtatccaatttagttgagtgtttatctgatgaattttgtctggatgaaaaaaaagaattgtccgagaaagtcaaacatgcgaagcgacttagtgatgagcggaatttacttcaagatccaaactttagagggatcaatagacaactagaccgtggctggagaggaagtacggatattaccatccaaggaggcgatgacgtattcaaagagaattacgttacgctattgggtacctttgatgagtgctatccaacgtatttatatcaaaaaatagatgagtcgaaattaaaagcctatacccgttaccaattaagagggtatatcgaagatagtcaagacatagaaatctatttaattcgctacaatgccaaacacgaaacagtaaatgtgccaggtacgggttccttatggccgctttcagccccaagtccaatcggaaaatgtgcccatcattcccatcatttctccttggacattgatgttggatgtacagacttaaatgaggacttaggtgtatgggtgatattcaagattaagacgcaagatggccatgcaagactaggaaatctagaatttctcgaagagaaaccattagtaggagaagcactagctcgtgtgaaaagagcggagaaaaaatggagaggcaaacgtgaaaaattggaatgggaaacaaatattgtttataaagaggcaaaagaatctgtagatgctttatttgtaaactctcaatatgatagattacaagcggataccaacatcgcgatgattcatgcggcagataaacgcgttcatagcattcgagaagcttatctgcctgagctgtctgtgattccgggtgtcaatgcggctatttttgaagaattagaagggcgtattttcactgcattctccctatatgatgcgagaaatgtcattaaaaatggtgattttaataatggcttatcctgctggaacgtgaaagggcatgtggatgtagaagaacaaaacaaccaccgttcggtccttgttgttccggaatgggaagcagaagtgtcacaagaagttcgtgtctgtccgggtcgtggctatatccttcgtgtcacagcgtacaaggagggatatggagaaggttgcgtaaccattcatgagatcgagaacaatacagacgaactgaagtttagcaactgtgtagaagaggaagtatatccaaacaacacggtaacgtgtaatgattatactgcgactcaagaagaatatgagggtacgtacacttctcgtaatcgaggatatgacggagcctatgaaagcaattcttctgtaccagctgattatgcatcagcctatgaagaaaaagcatatacagatggacgaagagacaatccttgtgaatctaacagaggatatggggattacacaccactaccagctggctatgtgacaaaagaattagagtacttcccagaaaccgataaggtatggattgagatcggagaaacggaaggaacattcattgtggatagcgtggaattacttcttatggaggaataa

SEQ ID NO: 269 - DNA, 3687 bp, Bacillus thuringiensis
  source 1..3687: mol_type = genomic DNA
atgacttcaaataggaaaaatgagaatgaaattataaatgctgtatcgaatcattccgcacaaatggatctattaccagatgctcgtattgaggatagcttgtgtatagccgaggggaacaatatcgatccatttgttagcgcatcaacagtccaaacgggtattaacatagctggtagaatactaggcgtattgggcgtaccgtttgctggacaactagctagtttttatagttttcttgttggtgaattatggccccgcggcagagatcagtgggaaattttcctagaacatgtcgaacaacttataaatcaacaaataacagaaaatgctaggaatacggctcttgctcgattacaaggtttaggagattccttcagagcctatcaacagtcacttgaagattggctagaaaaccgtgatgatgcaagaacgagaagtgttctttatacccaatatatagctttagaacttgattttcttaatgcgatgccgcttttcgcaattagaaaccaagaagttccattattgatggtatatgctcaagctgcaaatttacacctattattattgagagatgcctctctttttggtagtgaatttgggcttacatcgcaggaaattcaacgctattatgagcgccaagtggaacgaacgagagattattccgactattgcgtagaatggtataatacaggtctaaatagcttgagagggacaaatgccgcaagttgggtacggtataatcaattccgtagaggtctaacgttaggagtattaggtctagtggcactattcccaagctatgacactcgcacttatccaataaatacgagtgctcagttaacaagagaagtttatacagacgcaattggagcaacaggggtaaatatggcaagtatgaattggtataataataatgcaccttcgttctctgccatagaggctgcggctatccgaagcccgcatctacttgattttctagaacaacttacaatttttagcgcttcatcacgatggagtaatactaggcatatgacttattggcgggggcacacgattcaatctcggccaataggaggcggattaaatacctcaacgcatggggctaccaatacttctattaatcctgtaacattacggttcgcatctcgagacgtttataggactgaatcatatgcaggagtgcttctatggggaatttaccttgaacctattcatggtgtccctactgttaggtttaattttacgaaccctcagaatatttctgatagaggtaccgctaactatagtcaaccttatgagtcacctgggcttcaattaaaagattcagaaactgaattaccaccagaaacaacagaacgaccaaattatgaatcttacagtcacaggttatctcatataggtataattttacaatccagggtgaatgtaccggtatattcttggacgcatcgtagtgcagatcgtacgaatacgattggaccaaatagaatcacccaaatcccaatggtaaaagcatccgaacttcctcaaggtaccactgttgttagaggaccaggatttactggtggggatattcttcgaagaacgaatactggtggatttggaccgataagagtaactgttaacggaccattaacacaaagatatcgtataggattccgctatgcttcaactgtagattttgatttctttgcatcacgtggaggtactactgtaaataattttagattcctacgtacaatgaacagtggagacgaactaaaatacggaaattttgtgagacgtgcttttactacaccttttacttttacacaaattcaaaatataattcgaacgtctattcaaggccttagtggaaatggggaagtgtatatagataaaattgaaattattccagttactgcaaccttcgaagcagaatatgatttagaaagagcgcaagaggcggtgaatgctctgtttactaatacgaatccaagaagattgaaaacagatgtgacagattatcatattgatcaagtatccaatttagtggcgtgtctatcggatgaattctgcttggatgaaaagagagaattacttgagaaagtgaaatatgcgaaacgactcagtgatgaaagaaacttactccaagatccaaacttcacatccatcaataagcaaccagacttcatatctactaatgagcaatcgaatttcacatctatccatgaacaatctgaacatggatggtggggaagtgagaacattaccatccaggaaggaaatgacgtatctaaagagaattacgtcacactaccgggtacttttaatgagtgttatccgacgtatttatatcaaaaaataggggagtcggaattaaaagcttatactcgctaccaattagaaggttatattgaagatagtcaagatttagagatatatttgattcgttataatgcgaaacatgaaacattggatgttccaggtaccgagtccctatggccgctttcagttgaaagcccaatcggaaggtgcggagaaccgaatcgatgcgcaccacattttgaatggaatcctgatctagattgttcctgcagagatggagaaaaatgtgcgcatcattcccatcatttctctttggatattgatgttggatgcacagacttgcatgagaatctaggcgtgtgggtggtattcaagattaagacgcaggaaggtcatgcaagactagggaatctggaatttattgaagagaaaccattattaggagaagcactgtctcgtgtgaagagggcagagaaaaaatggagagacaaacgtgaaaaactacaattggaaacaaaacgagtatatacagaggcaaaagaagctgtggatgctttattcgtagattctcaatatgatagattacaagcggatacaaacatcggcatgattcatgcggcagataaacttgttcatcgaattcgagaggcgtatctttcagaattacctgttatcccaggtgtaaatgcggaaatttttgaagaattagaaggtcacattatcactgcaatctccttatacgatgcgagaaatgtcgttaaaaatggtgattttaataatggattaacatgttggaatgtaaaagggcatgtagatgtacaacagagccatcatcgttctgaccttgttatcccagaatgggaagcagaagtgtcacaagcagttcgcgtctgtccggggtgtggctatatccttagtgtcacagcgtacaaagagggatatggagagggctgcgtaacgatccatgaaatcgagaacaatacagacgaactaaaatttaaaaaccgtgaagaagaggaagtgtatccaacggatacaggaacgtgtaatgattatactgcacaccaaggtacagctggatgcgcagatgcatgtaattcccgtaatgctggatatgaggatgcatatgaagttgatactacagcatctgttaattacaaaccgacttatgaagaagaaacgtatacagatgtaagaagagataatcattgtgaatatgacagagggtatgtcaattatccaccagtaccagctggttatgtgacaaaagaattagaatacttcccagaaacagatacagtatggattgagattggagaaacggaaggaaagtttatggtagatagcgtggaattactcctcatggaagaatag

SEQ ID NO: 270 - DNA, 3531 bp, Bacillus thuringiensis
  source 1..3531: mol_type = genomic DNA
atggagaataatattcaaaatcaatgcgtaccttacaattgtttaagtaatcctgaggagatacttttagatggagaaagaatatcaactggtaattcatcaattgatatctctctgtcacttgtccagcttctggtatctaactttgtaccagggggaggatttttagttggattattagattttgtatggggaatagtaggcccttctccatgggatgcatttctagtgcaaattgaacaattaattaatgaaagaatagctgcatatgctaggtctgcagcaatttctaatttagaaggattaggaaacaatttcaatatatatgtggaagcatttaaagaatgggaagcagatcctgataatccagtaaccaggactagagtagttgatcgctttcgtatacttgatgggctacttgaaagggacatcccttcatttcgaattgctggatttgaagtaccccttttatccgtttatgctcaagcggccaatttgcatctagctatattaagagattcttcaatttttggagcaagatggggattgacaacaataaatgtcaatgaaaactataataggctaattaggcatattgatgaatatgctaatcactgtgcagatacgtataatcggggataaaataatttaccaaaatctacgtatcaagattggataacatataatcgattacggagagacttaacattaactgtattagatatcgctgctttctttccaagctatgacaataggagatatccaattcagtcagttggtcaactaacaagggaaatttatacggacccattaattacttttaatccacagttacagtctgtagctcaattacctacttttaacgttatggaaagcaacgcaattagaactcctcatttatttgatgtattgaataatcttacaatttttacagattggtttagtgttggacgcaacttttattggggaggacatcgagtaatatctaaccgtataggaggaggtaacataacatctcctatatatggaagagaggcgaatcaggagcctccaagatcttttacttttaatgggcctgtttttaggactttatcaaatcctacttttagacctttacagcaaccttggccagcgccaccatttaatttacgtggtgttgaaggagtagaattttctacacctttaaatagctttacgtatcgaggaagaggtacggttgattctttaactgagttaccgcctgaggataatagtgtgcctcctcgcgaaggatatagtcatcgtttatgtcatgcaacttttgttcaaagatctggaaccccatttttaacaactggtccagtattttcttggacgcatcgtagtgctactgatcgaaatataatctacccggatgtaattaaccaaataccgttagtaaaagcattcaaccttacttcaggtacctctgtagtcagaggtccaggatttacaggaggggatatcatccgaactaacgttaatggtagtgtactaagtatgagtcttaattttagtaacacaacattacagcagtatcgtgtgtgagttcgttatgctgcttctcaaacaatggtcatgagcgtaactgttggagggagtactactggtaatcaaggattccctagtactatgagtgcaaatggggctttgacatctcaatcatttagattcgcagaatttcctgtaggtattagtgcatctggcagtcaaggtgcatcaataagtattagtaataatgtaggtagacaaatgtttcacttagatagaattgaatttctcccagttacttctacatttgaggaggaatatgatttagaaagagcgcaagaggcggtgaatgccctgtttacttctacgaaccaactagggctaaaaacagatgtaacggattatcatattgatcaagtatcaaatctagttgaatgcttatcggatgaattttgtctggatgaaaagcgagaattgtctgagaaagtcaaacatgcgaagcgactcagcgatgagcgcaatttactccaggatcgaaatttcagatccattaatgggcaactaggccgtggctggagaggaagtacggatattaccatccaaggtggagatgacgtattcaaagagaattacgtcacactgccgggtacctttgatgagtgctatccaacgtatctatatcaaaaaatagatgaatcgaaattaaaatcctatacacgttacgagttaagagggtatatcgaggatagtcaagatttagaaatctatttgattcgctacaatgcaaaacacgaaatagtaaatgtaccaggtacagggagtttatggcctctttctatagaaaattcaattgggccttgtggagaaccgaatcgctgcgcgccacaccttgaatggaatcctaatctagattgttcctgcagggacggggaaaaatgtgcccatcattcccatcatttctccttggacattgatgttggatgtacagacttaaatgaggacttaggtgtatgggtgatcttcaagattaagacgcaagatggccatgcaagactaggaaatctagagtttctcgaagagaaaccactattaggggaagcactagctcgtgtgaaaagagcggagaagaaatggagagacaaacgtgaaaaattggaatgggaaacaaatattgtttataaagaggcaaaagaatctgtagatgctttatttgtgaactctcaatatgatagattacaagcggatacgaatatcgcgatgattcatgcggcagataaacgcgttcatagaattagagaagcataccttccagaattatctgtaattccgggtgtaaatgcgggcattttcgaagaattagagggacgcattttcacagcctactctctatatgatgcgagaaatgtcattaaaaatggcgatttcaataatggtttattatgctggaacttgaaagggcatgtagatgtagaagaacaaaacaaccatcgttcagtccttgttgtcccggaatgggaagcggaggtgtcccaagaagttcgtgtctgtccaggtcgtggctatatccttcgtgttacagcgtacaaagagggatatggagagggctgcgtaaccattcatgagatcgaagacaatacagacgaactgaaatttagcaactgtgttgaagaggaagtatatccaaacaacacggtaacgtgtaatgattatactgcgactcaagaagaatacgggggtgcgtacacttcccgtaatcatggatatggcaaatcttatgaaagtaattcttccgtacaagctgattatgcgtcagtttatgaagaaaaagcggacacagatggacgaagagataatcattgcgaatctaacagagggtatggggattacacgccactaccagctggttatgtaacaaaagaattagaatacttcccagaaaccgataaggtatgggttgagattggagaaacggaaggaacattcattgtggatagtgtggaattactccttatggaggaataa

SEQ ID NO: 271 - DNA, 8373 bp, Bacillus thuringiensis
  source 1..8373: mol_type = genomic DNA
tgaaaaataaatttattatttgagaaataaaatcacttgaactcttgtcgcaaatgctaaagcctgagaattggatactatcagaaaacatgcaaatgaaaggtgaaggactcatagagattttgggaaatagttattttaaacaattcattaaattggaagatgattcaacctattttctaagactatctttcaagggaacaggtagggtacccatgattgatgaatctagttatttagttttcgcaaatgttaaggatgaaaattttactagagttattaaaaaatttgtcttcaaagggtgagtgttttattggtatttatggtacctatgtagaaaatgcaagtattatttttctaatgtatttattgttaaagagtagaaaagatataatatttaattatacaaaaattaatagaataccttttgaaagtaatattattccaaaaggaaaaagtttttttatttgtacacgctgataaaagaaagatttcttataatattgcattcagttatcatcgagataaacttgaatcattacttttagaaaagttagctccccggtccttattctccatgtaattaaggtcttgaactatccccactttcacttcgtttagaagtgagggattcctaagtaaagagttctatcgaactctaattgattaggctaaccccgcagtccttgcggttagaagccttattgcttcattctttagattgatactcgcgttaatatccctatcatggtttgtacgacaagaaggacagtcccattcacgtaggtttagatttttaacgtctttattttgatatccacaacaagaacgtaattggctggaagcaaatgttttcgatacgacaatgacttgtttgccataccattttgctttgtattctaacatgaatcgaaattgcgaccaagatacctcaataattgcttttgctaacttatgattttttaacatattcgatacttgcaaatcctctataccgataacatcgtggtttttgatgatttcagttgaaattttgtccaagtaatcttttctagtatttgatatgaattctagctatctttactctttgtttattccagcgagaagatcctttcattcttctagaaagaacacgctgtgttttcggaagttcttgtacttctgtttcaactaatagtgacacaaaatatctaccagaaggggttcgtctaacagtcgcatttacaatacgcccctctacttcgcgacttttagcaaatcgaacaaggcctagtttcggtaactttattttgttccctacaacggcaatgttttcatttgtttgttttgtggtataagattgtacgttgttcttcttagatttaaaacgcggtgcgctgttttgttttttgaaaagcgtgtataagcatccgcaaggttgcgaacagacgactgaatcgcaatactatccacttcttttagccaaacaagctctttcttcatggcaggtagtttggcagagaatgtaccataggtcaagccttttcctgtctctttgtatacttgatcccataaggataggaaatgattgaatacaaagcgagaacacccaatcgttttgttgattagaattgcttgtgcctgatttggatagatacgaaacttataggctttattcatcattatgtaattcacctccatttcggtatatgactattatacaccgaacatacattcgatagatagtggagtaacactttctgtatatctaacaattaagatggcttcctgccatcccttgttcgaattcatctcccacctactcactgggctgtggcccttcacgctccttgaggaaggagtcttcttggctaaaataataaatagatctgttttaatataagggatttgtgcccttctcgttatattcttttattagccccaaaaactagtgcaactaaatatttttataattacactgattaaatactttatttttgggagtaagatttatgctgaaatgtaataaaattcgttccattttctgtattttctcataaaatgtttcatatgctttaaattgtagtaaagaaaaacagtacaaacttaaaaggactttagtaatttaataaaaaaaggggatagtttatggaaataaataatcaaaaccaatgtgtgccttacaattgtttaagtaatcctaaggagataatattaggcgaggaaaggctagaaacagggaatactgtagcagacatttcattagggcttattaattttctatattctaattttgtaccaggaggaggatttatagtaggtttactagaattaatatggggatttatagggccttcgcaatgggatatttttttagctcaaattgagcaattgattagtcaaagaatagaagaatttgctaggaatcaggcaatttcaagattggaggggctaagcaatctttataaggtctatgttagagcgtttagcgactgggagaaagatcctactaatcctgctttaagggaagaaatgcgtatacaatttaatgacatgaatagtgctctcataacggctattccactttttagagttcaaaattatgaagttgctcttttatctgtatatgttcaagccgcaaacttacatttatctattttaagggatgtttcagttttcggagaaagatggggatatgatacagcgactatcaataatcgctatagtgatctgactagccttattcatgtttatactaaccattgtgtggatacgtataatcagggattaaggcgtttggaaggtcgttttcttagcgattggattgtatataatcgtttccggagacaattgacaatttcagtattagatattgttgcgttttttccaaattatgatattagaacatatccaattcaaacagctactcagctaacgagggaagtctatctggatttaccttttattaatgaaaatctttctcctgcagcaagctatccaaccttttcagctgctgaaagtgctataattagaagtcctcatttagtagactttttaaatagctttaccatttatacagatagtctggcacgttatgcatattggggagggcacttggtaaattctttccgcacaggaaccactactaatttgataagatcccctttatatggaagggaaggaaatacagagcgccccgtaactattaccgcatcacctagcgtaccaatatttagaacactttcatatattacaggccttgacaattcaaatcctgtagctggaatcgagggagtggaattccaaaatactataagtagaagtatctatcgtaaaagcggtccaatagattcttttagtgaattaccacctcaagatgccagcgtatctcctgcaattgggtatagtcaccgtttatgccatgcaacatttttagaacggattagtggaccaagaatagcaggcaccgtattttcttggacacaccgtagtgccagccctactaatgaagtaagtccatctagaattacacaaattccatgggtaaaggcgcatactcttgcatctggtgcctccgtcattaaaggtcctggatttacaggtggagatattctgactaggaatagtatgggcgagctggggaccttacgagtaaccttcacaggaagattaccacaaagttattatatacgtttccgttatgcttcggtagcaaataggagtggtacatttagatattcacagccaccttcgtatggaatttcatttccaaaaactatggacgcaggtgaaccactaacatctcgttcgttcgctcatacaacactcttcactccaataaccttttcacgagctcaagaagaatttgatctatacatccaatcgggtgtttatatagatcgaattgaatttataccggttactgcaacatttgaggcagaatatgatttagaaagagcgcaaaaggtggtgaatgccctgtttacgtctacaaaccaactagggctaaaaacagatgtgacggattatcatattgatcaggtatccaatctagttgcgtgtttatcggatgaattttgtctggatgaaaagagagaattgtccgagaaagttaaacatgcaaagcgactcagtgatgagcggaatttacttcaagatccaaacttcagagggatcaataggcaaccagaccgtggctggagaggaagtacggatattactatccaaggaggagatgacgtattcaaagagaattacgttacgctaccgggtacctttgatgagtgctatccaacgtatttatatcaaaaaatagatgagtcgaaattaaaagcctatacccgttatcaattaagagggtatatcgaagatagtcaagacttagaaatctatttaattcgttacaatgcaaaacacgaaatagtaaatgtaccaggtacaggaagtttatggcctctttctgtagaaaatcaaattggaccttgtggagaaccgaatcgatgcgcgccacaccttgaatggaatcctgatttacactgttcctgcagagacggggaaaaatgtgcacatcattctcatcatttctctttggacattgatgttggatgtacagacttaaatgaggacttaggtgtatgggtgatattcaagattaagacgcaagatggccacgcacgactagggaatctagagtttctcgaagagaaaccattattaggagaagcactagctcgtgtgaaaagagcggagaaaaaatggagagacaaacgcgaaacattacaattggaaacaactatcgtttataaagaggcaaaagaatctgtagatgctttatttgtaaactctcaatatgatagattacaagcggatacgaacatcgcgatgattcatgcggcagataaacgcgttcatagaattcgagaagcgtatctgccggagctgtctgtgattccgggtgtcaatgcggctatttttgaagaattagaagagcgtattttcactgcattttccctatatgatgcgagaaatattattaaaaatggcgatttcaataatggcttattatgctggaacgtgaaagggcatgtagaggtagaagaacaaaacaatcaccgttcagtcctggttatcccagaatgggaggcagaagtgtcacaagaggttcgtgtctgtccaggtcgtggctatatccttcgtgttacagcgtacaaagagggatatggagaaggttgcgtaacgatccatgagatcgagaacaatacagacgaactgaaattcaacaactgtgtagaagaggaagtatatccaaacaacacggtaacgtgtattaattatactgcgactcaagaagaatatgagggtacgtacacttctcgtaatcgaggatatgacgaagcctatggtaataacccttccgtaccagctgattatgcgtcagtctatgaagaaaaatcgtatacagatagacgaagagagaatccttgtgaatctaacagaggatatggagattacacaccactaccagctggttatgtaacaaaggaattagagtacttcccagagaccgataaggtatggattgagattggagaaacagaaggaacattcatcgtggacagcgtggaattactccttatggaggaataggaccatcccgagtatagcagttttaataaatattaattaaaatagtagtctaacttccgttccaattaaataagtaaattacagttgtaaaaaaaaacggacattactcttcaaagagcgatgtccgttttttatatggtgtgtgctaatgataagtgcgcacgaaattttattgtcaaaatagtatttacttgagaaaaagatcatgttatgtagagatattcccttataatacttgttccacattcataatttttggatgatacattacaacaaaaacagtcgcaaatttatattttctgcataaaatatatagttaagaacctaagaagagaatcaagtagtaggataaaactgaataaggaagtgtagctacaatgaataaaaaaataagaaatgaagatgagcattcatcgatagaattatcatatagtaattcaaaaaatcaaaagcataaggtaccattttgttgtaccatttcaattcctaaaggatgggaagttatatcagaatgccagcccaaaatcgtctatcaacttgattgtctgtctattataaaagaaacgtgtcgcaaagtggttgaggtaaaagattgtggtcaaacggaaatcgatgttaatgtgttaaaaataaaaggatgtatctcttttctgattaatatagaggtgaggccaaaggatgaacgatgtgtttgcttcacagattcccaaaatcaagacatagcattgtgttgtaaagataccgtatgtgtagatcatgtacttcaatgtagtgtggggcatttaccacctcttcatttaaattgtcacaatgtaacagtctgtgatgtaaaagtggtaccggtctgcgatgcggcctgtcaattcgtgaaagtgacagggggttttcaatttcatcctcacttttaaatatcgaggttccgactcccttgtatattgatgattttctcataaaaagtgactataaatataatgttaaagtttgtatatttaatatatttgcagtgggaatggaaaaggggggctttatcatcctttatagcttgtggaaagaggcgaatttaatgggaaattggtttttatttgaagtcctcgatatatgaaacccttcatgtgaatttttaaaaccgtaaccacatttaagaaaaagaaaaatgtttaaactttcatcactataacattaatatttaaatgaagtgggatatattatgcgaaacttcagatagagatagaaaatgaataactaaaaaaattcttacaagatatcattattttaatttgattattgtttctattctgcttattttatgttaaatttaatatgtacatgtaaaatggtttgaaatttagtatgattacatgcaggaaaagagtacgttcgaaaaagaacgtactcttttatatttaccttgattatcttaaaaatataatcatcatttttattaggtataaatttgatatgaaacacatacattcttaaaagtacttgttttttaatagagcaatatagtttgaactatttatttacggtatataaagctgcacgcctacactatacaggatgtatgaaaaaagttttaaaatccacagatatagcaaagtgctcatttgccatatctgtggattttaaaacataggttatgttacaaaaacattataagagattaaccgtcaaagatgtgaaccagatataagccagctagtttttttacgaatgtagtatacccaaacaatttataagacatatgtatacaaaccttaaattcaaagatttattctcaggaactctaaagtatggatgaaagagaaataagccctggttatttaaacggtgaaggaagttcaatatgataaaggaaaatatcagattagaggctctacacaactaaaaaatttggtgaaaaaatataaagaatttagtggaattacagatacttgtgggaaaaatggtggaatgaaaggtgtatcaaattggttaaaagagaaatatccagttatatggtttacgaaatttgcgggtgtacatcgttgaagtattcataccaaaggtatgaaaaatatacggctagaactcgaaaaatgattaaaaaagtaagatctattcacgtaaagcacaaagaatttggttatccacatatgaaaatccctttacaggaagagggatattttataaatcacaagaaagtatatcgcttaaagatggggctaaacatccaatctattattcgaaagaagcgttgcttctttaaagggaactattccaaattttttctgaatgttttaaatcgtgagtttaaagatcgccaacaaaatgaggcacttgttacagatattacttacctacaattccaagaggaatttcggtatctttctgttgtacaaggtgtttataataacgcaggtgtttcttggaaaatatctacgcgtaatgataatgaacttgtattagatacgattgaaatattggcacaaaaaagagacgtgcgtggaaccattctccattcagatcaaggattccagtacacatctcatgcctacaacaaacgactttccgatttaagtatcattggtaactactcccgcaaaggaaactgccataataacgtttgtatcgagtcatttttctcccatttcaaatcggagatgttgtatttgaatcattttaaaacagaagaaaatttaatacaagccaatgaaaaatatatttacttttataactatagacggttcaaaaaacgactcaaccatc

SEQ ID NO: 272 - DNA, 3516 bp, Bacillus thuringiensis
  source 1..3516: mol_type = genomic DNA
atggagatagtgaataatcagaatcaatgcgtgccttataattgtttaaataatcctgaaaatgagatattagatattgaaaggtcaaatagtactgtagcaacaaacatcgccttggagattagtcgtctgctcgcttccgcaactccaataggggggattttattaggattgtttgatgcaatatgggggtctataggcccttcacaatgggatttatttttagagcaaattgagctattgattgaccaaaaaatagaggaattcgctagaaaccaggcaatttctagattagaagggataagcagtctgtacggaatttatacagaagcttttagagagtgggaagcagatcctactaatccagcattaaaagaagagatgcgtactcaatttaatgacatgaacagtattcttgtaacagctattcctcttttttcagttcaaaattatcaagtcccatttttatcagtatatgttcaagctgcaaatttacatttatcggttttgagagatgtttcagtgtttgggcaggcttggggatttgatatagcaacaataaatagtcgttataatgatctgactagacttattcctatatatacagattatgctgtacgctggtacaatacgggattagatcgcttaccacgaactggtgggctgcgaaactgggcaagatttaatcagtttagaagagagttaacaatatcagtattagatattatttcttttttcagaaattacgattctagattatatccaattccaacaagctcccaattaacgcgggaagtatatacagatccggtaattaatataactgactatagagttggccccagcttcgagaatattgagaactcagccattagaagcccccaccttatggacttcttaaataatttgaccattgatacggatttgattagaggtgttcactattgggcagggcatcgtgtaacttctcattttacaggtagttctcaagtgataacaacccctcaatatgggataaccgcaaatgcggaaccaagacgaactattgctcctagtacttttccaggtcttaacctattttatagaacattatcaaatcctttcttccgaagatcagaaaatattactcctaccttagggataaatgtagtacagggagtagggttcattcaaccaaataatgctgaagttctatatagaagtagggggacagtagattctcttaatgagttaccaattgatggtgagaattcattagttggatatagtcatcgattaagtcatgttacactaaccaggtcgttatataatactaatataactagcctgccaacatttgtttggacacatcacagtgctactaatacaaatacaattaatccagatattattacacaaatacctttagtgaaaggatttagacttggtggtggcacctctgtcattaaaggaccaggatttacaggaggggatatccttcgaagaaataccattggtgagtttgtgtctttacaagtcaatattaactcaccaattacccaaagataccgtttaagatttcgttatgcttccagtagggatgcacgaattactgtagcgataggaggacaaattagagtagatatgacccttgaaaaaaccatggaaattggggagagcttaacatctagaacatttagctataccaattttagtaatcctttttcatttagggctaatccagatataattagaatagctgaagaacttcctattcgtggtggtgagctttatatagataaaattgaacttattctagcagatgcaacatttgaagaagaatatgatttggaaagagcacagaaggcggtgaatgccctgtttacttctacaaatcaactagggctaaaaacagatgtgacggattatcatattgatcaagtttccaatttagttgagtgtttatcggatgaattttgtctggatgaaaagagagaattatccgagaaagtcaaacatgcgaagcgactcagtgatgaacggaatttacttcaagatccaaacttcagagggatcaataggcaaccagaccgtggctggagaggaagcacggatattactatccaaggtggagatgacgtattcaaagagaattacgtcacattaccgggtacctttgatgagtgctatccaacgtatttatatcaaaaaatagatgagtcgaagttaaaagcttatacccgctatgaattaagagggtatatcgaggatagtcaagacttagaaatctatttaattcgctacaatgcaaaacacgagacagtaaacgtgccaggtacgggttccttatggccgctttcagcccaaagtccaatcggaaagtgtggagaaccgaatcgatgcgcgccacaccttgaatggaatcctaatctagattgctcctgcagagacggggaaaaatgtgcccatcattcccatcatttctccttggacattgatgttggatgtacagacttaaatgaggacttaggtgtatgggtgatattcaagattaagacacaagatggctatgcaagactaggaaatctagagtttctcgaagagaaaccactattaggggaagcactagctcgtgtgaaaagagcggagaaaaaatggagagacaaatgcgaaaaattggaatgggaaacaaatattgtttataaagaggcaaaagaatctgtagatgctttatttgtaaactctcaatatgatagattacaagcggatacgaatatcgcgatgattcatgcggcagataaacgcgttcatagcattcgagaagcgtatctgccagagctgtctgtgattccgggtgtcaatgcggctatttttgaagaattagaagggcgtattttcactgcattctccctatatgatgcgagaaatgtcattaaaaatggcgatttcaataatggcttatcatgctggaacgtgaaagggcatgtagatgtagaagaacagaacaaccatcgttcggtccttgttgttccagaatgggaagcagaagtgtcacaagaagttcgtgtttgtccgggtcgtggctatatccttcgtgttacagcgtacaaagagggatatggagagggctgtgtaacgattcatgagatcgaagacaatacagacgaactgaaattcagcaactgtgtagaagaggaagtatatccaaacaacacggtaacgtgtaataattatactgcgactcaagaagaacatgagggtacgtacacttcccgtaatcgaggatatgacgaagcctatgaaagcaattcttctgtacatgcgtcagtctatgaagaaaaatcgtatacagatagacgaagagagaatccttgtgaatctaacagaggatatggggattacacaccactaccagctggctatgtgacaaaagaattagagtacttcccagaaaccgataaggtatggattgagatcggagaaacggaaggaacattcatcgtggacagcgtggaattacttcttatggaggaataa

SEQ ID NO: 273 - DNA, 3525 bp, Bacillus thuringiensis
  source 1..3525: mol_type = genomic DNA
atggagaataatattcaaaatcaatgcgtaccttacaattgtttaagtaatcctgaagtagaaatattaagtgaagaaagaagtactggcagattaccgttagatatatccttgtcgcttacacgtttccttttgagtgaatttgttccaggtgtgggagttgcgtttggattatttgatttaatatggggttttataactccttctgaatggagtttatttcttttacagattgaacaactgattgaacaaagaattgaaacattggaaaggaaccgggcaattactacattacgagggttagcggatagctatgaagtttaccttgaggcactaagagagtgggaagaaaatcctaataatgcacaattaagggaagatgtgcgtattcgatttgctaatacagacgacgctttaataacagcaataaataattttacacttacaagttttgaaatccctcttttatcggtctatgttcaagcggcgaatctacatttatcactattaagagatgctgtatcgtttgggcagggttgggggctggatatagctactgttaataatcattataataggttaataaatcttattcatagatatacggaacattgtttggacacatacaatcaaggattagaaaacttaagaggtactaatactcgacaatggtcaagattcaatcagtttaggagagagttaacattgactgtattagatatcgttgctctttttccgaactacgatgctggagcatatccaattcaaacgtcatcccaattaacaagggaaatttatacaagttcagtaattgaagattctccagtttctgctaatatacctaatggttttaatagagcggaatttggagttagaccgccccatcttatggactttatgaattctttgtttgtaactgcagagactgttagaagtcaaactgtgtggggaggacacttagttagttcacgaaatacggctggtaaccctataaatttccctatttatgggatcttcaatcctggtggcgccatttggattgcagatgaggatccacgtcctttttatcggacattatcagatcctgtttttgtccgaggaggatttgggaatcctcattatgtacttgggcttaggggagtagcatttcaacaaactggtacgaaccacacccgaacatttagaaatagtgggaccatagattctctagatgaaatcccacctcaggataatagtggggcaccttggaatgattatagtcatgtattaaatcatgttacatttgtaaggtggcctggtgagattgcaggaagtgattcatggagagcgccaatgttttcttggacacaccgtagtgcagatcgtacaaatatcattaatccaaatataattacacaaatacctgctgtaaaagcacacaatcttcattcgggttctacggttgttagaggacccgggtttacaggtggtgatctcttacgaagaacgaatactggtacatttgcagatataagagtaaatattactgggccattatctcaaagatatcgtgtaagaattcgctatgcttctacgacagatttacaatttttcacgagaatcaatggaacttctgtaaatcaaggtaatttccaaagaactatgaatagagggggtaatttagagtctggaaactttaggactgcaggatttagtacgccttttagtttttcaaatgcgcaaagtacattcacattgggtactcaggctttttcaaatcaggaagtttatatagatcgaattgaatttgtcccggcagaagtaacattcgaggcagaatctgatttagaaagagcgcaaaaggcggtgaatgccctgtttacttctacaagccaactagggctaaaaacaaatgtaacgggttaccatattgatcaagtgtccaatttagttgcgtgtttatcggatgaattttgtctggatgaaaagagagaattgtccgagaaagttaaacatgcgaagcgactcagtgataagcggaatttacttcaagatccaaacttcagagggatcagtaggcaaccagaccatggctggagaggaagtacggatattactatccaaggaggagatgacgtattcaaagagaattacgttacgctaccgggtacttttgatgagtgctatccaacgtatttatatcaaaaaatagatgagtcgaaattaaaagcctatacccgttatcaattaagagggtatatcgaagatagtcaagacttagaaatctatttaattcgttacaattcaaaacacgaaatagtaaatgtaccaggtacagggagtttatggcctctttctgtagaaaatcaaattggaccttgtggagaaccgaatcgatgcgcgccacaccttgaatggaatcctgatttacactgttcctgcagagacggggaaaaatgtgtgcatcattctcatcatttctctttggacattgatgtcggatgtacagatttaaatgaggacctaggtgtatggttgatattcaagattaagacgcaagatggccacgcaagactagggaatctagagtttctcgaagaggaaccgttattaggcgaagcgttagcacgtgtgaagagagcggagaagaagtggagagacaaacgcgagaaactgcagttggaaacaaatattgtctataaagaggcaaaagaatctgtagatgctttatttgtaaactctcaatatgatagattacaagcggatacgaacatcgcgatgattcatgcggcagataaacgcgttcatagaatccgggaagcgtatctgccagagttgtctgtgattccaggtgtcaatgcggccattttcgaagaattagagggacgtatttttacagcgtattccttatatgatgcgagaaatgttattaaaaatggcaatttcaataatggcttattatgctggaacgtgaaagggcatgtagatgtagaagagcaaaacaaccaccgttcggtccttgttatcccagaatgggaagcagaagtgtcacaaaaagttcgtgtctgtccaggtcgtggttatatccttcgtgttacagcgtacaaagagggatatggagaaggtagcgtaacgatccatgagatcgaagacaatacagacgaattaaagtttagcaactgtgtagaagaaggatatccaaacaacacggtaacgtgtaatgagtatactatgaatcaaggggtaggagagtgtacggatgcatgtaatgtccgtaatcgtggatatgaggatgcatatggacacaatccttcaacgcctgttcattacacaacgccgtacgaagaagaaacgtatacagatgaacgaagagagaatccttgtgaagctaacaaagggtatgtgaattacacgccactaccagttggttatgtaacaaaagaattagaatacttcccagaaaccgataaggtatgggttgagattggagaaacggaaggaacattcattgtggatagtgtggaattactccttatggaggaataa

SEQ ID NO: 274 - DNA, 2920 bp, Bacillus thuringiensis
  source 1..2920: mol_type = genomic DNA
atcgatgaaaatatctctgctttttctttctttatttggtatatgctttacttgtaatcgaaaataaagcactaataagagtatttataggtgtttgaagtcatttcagttcatttttaaaggaggtttaaaagtgttagaaagttattaaggaataatacttacagtaaatcctacctatattttacaattaattatgatatttatgcataaattaaaaatgctttatttgacattacagctaagtataattttttatgaataaaattttatttgaaaattaaataatattatatgtgagggattaatatgaaactaaagaatccagataagcatcaaagcttgtctagcaatgcgaaagtagataaaatcgctacggattcactaaaaaatgaaacagatatagaattgaaaaatattaatcatgaggatttcctaagaatgtctgagcatgagagtattgatccgtttgttagtgcatcaacaattcaaacgggtattggaattgctggtaagattcttggtactctaggtgttccttttgctggacaaatagctagcctctatagttttatcttaggcgagctttggcctaaagggaaaagtcaatgggaaatctttatggaacatgtagaagagcttattgaccaaaaaatatcaacttacgcaagaaacatagcacttgcagatttaaaaggcttaggagatgctttggctgtctaccatgaatcgcttgaaagttggattaaaaatcgcaacaacgcaagggctacaagtgttgtcaagagccaatatattgctttagaactattgtttgttcaaaagctgccttcttttgcagtatcaggtgaggaagtaccattattgccaatatatgcacaagctgcaaatttacacttattattactaagagatgcttctgtttttggaaaagagtggggattatctaattcgcaaatttctacattttataatcgtcaagtcgaaagaacgagtgactattccgaccattgtgtgaaatggtatagtacaggtctaaataacttgagaggtacaaatgccgaaagctgggtccgttataatcaatttcgtaaagatatgacattaatggtactagatttaatcgcattattcccaagctatgatacacttgtatatccaattaaaaccacttctcaacttacaagagaagtatatacagacgcaattgggacagtacatccaaatgcaagttttgcaagtacgacctggtataataataatgcaccttcgttctctgccatagagtctgctgttgttcgaaacccgcatctactcgattttttagaacaagttacaatttacagcttattaagtaggtggagtaacactcagtatatgaatatgtggggaggacatagactggaattccgaacaataggtggagtgttaaatacctcaacacaagggtctactaatacttctattaatcctgtaacattaccgttcacgtctcgagacgtctataggactgaatcattggcagggctgaatctatttttaactcaacctgttaatggagtacctagggttgattttcattggaaattcgccacacttccgattgcatctgataatttttattatctagggtatgctggagttggtacgcaattacaagattcagaaaatgaattaccacctgaaacaacaggacagccaaattatgaatcatatagtcatagattatcccatataggactcatttcagcatcccacgtgaaagcattggtatattcttggacacatcgtagtgcagatcgtacaaatacaattgagccaaatagcattacacaaataccattagtaaaagcgttcaatctgtcttcaggtgccgctgtagtgagaggaccaggatttacaggtggggatatccttcgaagaacgaatactggtacatttggggatatacgagtaaatattaatccaccatttgcacaaagatatcgcgtgaggattcgctatgcttctactacagatttacaattccatacgtcaattaacggtaaagctattaatcaaggtaatttttcagcaactatgaatagaggagaggacttagactataaaacctttagaactgtaggctttaccactccatttagcttttcagatgtacaaagtacattcacaataggtgcttggaacttctcttcaggtaacgaagtttatatagatcgaattgaatttgttccggtagaagtaacatatgaggcagaatatgattttgaaaaagcgcaagagaaggttactgcactgtttacatctacgaatccaagaggattaaaaacagatgtaaaggattatcatattgaccaggtatcaaatttagtagagtctctatcagatgaattctatcttgatgaaaagagagaattattcgagatagttaaatacgcgaagcaaatccatattgagcgtaacatgtagaattaaaatctacctaaatccagaaaaataaaagggttaaatatacaattcttgtaccaatattttgagtgattagatgtaggatgaaatttaattgtatgctatttaacagtagagatattaaaaattaatttatctatacattaatagtatagacatacaaacataagagagcattgtcttttcgtaggctacaatgctctctatttactatttatttttcttttgtatcttcaaattgacgttgttctaagcgttctattgcagctcgtcgtttagtatcatcaatgtttgtataaagagatgttgtttccatagaattatgtcccatttgatttgctaataatactaaatctttattttcattatagtgattagtagcataagtatgacgtaatttatgagggcttttcttttcatcaaaagcccttgtgtatttctctgtaagctt

SEQ ID NO: 275 - DNA, 4623 bp, Bacillus thuringiensis
  source 1..4623: mol_type = genomic DNA
tcaatttaaatatttcattttgaatataataaaactaaataatatgaagtttagaatattaatgttatgagctgctatcaaaaggaaagctgctatcaaaaggaaagcaataatgaagaataaataatagcttatatttttaggaaggccaaaagataagctattaaaacatactgaattcattctaaatataggtaatatatttatatttaataaaattcgttgcattttgtgaatattttcataagctgaaccatatgatttaaactggggccaagataaatggcccaaagttataaaggcatatgtgctaaagtccaaaaaacgggaggtaaatcatcaaaaaaatcgtactatacaattttcttaggtaatgctgtgttaaaactaatcagtggagaaaagttaaataggttgtaatgtaagcacaacgtaaaaggaggagttatattgaattcaaataggaaaaatgagaatgaaattataaatgctttatcgattccagctgtatcgaatcattccgcacaaatggatctatcaccagatgctcgcattgaggatagcttgtgtgtagccgaggggaacaatattgatccatttgttagcgcatcaacagtccaaacaggtattagtatagctggtagaatattaggcgtattaggggtgccgtttgccggacaactagctagtttttatagttttcttgttggggaattatggcctagcggcagagatccatgggaaatttttatggaacatgtcgaacaaattgtaagacaacaacaaataacggacagtgttagggataccgctattgctcgtttagaaggtctaggaagagggtatagatcttaccagcaggctcttgaaacttggttagataaccgaaatgatgcaagatcaagaagcattattcgtgagagatatattgctttagaacttgacattactactgctataccgcttttcagcatacgaaacgaagaggttccattattaatggtatatgctcaagctgcaaatttacacctattattattgagagacgcatccctttttggtagtgaatgggggatgtcatctgccgatgttaaccaatattaccaagaacaaatcagatatacagaggaatattctaaccattgcgtacaatggtataatacagggctaaatagattaagagggacaactgccgaaacttgggtacggtataatcaattccgtagagacctaacattaggtgtattagatttagtggcactattcccaagctatgacactcggacttatcccattccaactaccgcccaacttacaagagaagtgtatacagatccaaacggtgttgtagcaggacccaataatagttggtttagaaatggagcttcgttttccgctatagaaaacgcaattattcgacaacctcacctatatgattttctaacgaaccttacaatttacacgagaagaagtcaagtaggcactacaattatgaatttgtgggcagggcatagaatcacgtttaatagaatacaaggtggttctactagtgaaatggtgtatggggctattactaacccagttagtgttagtgacataccatttgtcaatcgggatgtttaccgaactgtatcattagctggtgggcttggctctctgagtggaatacgttatggtttaactagagttgattttgatatgatatttcgtaaccatcctgatatagtaactggattattttatcatccgggacacgcgggcattgcaacccaagtaaaagattcagacacagaattaccacctgaaacgacagaacagccaaattatagagcatttagtcatctactaagtcatatttcaatgggtccaacgactcaagacgtacctccagtatattcttggacacaccagagtgcagatcgtacgaatacaatcaattcggataggataacacaaataccattggtaaaggcgcataccctccaatcgggtaccactgtagtaaaagggccagggtttacaggaggggatatcctccgtcgaacaagtggaggaccatttgcttttagtaatgttaatctagattttaacttgtcacaaaggtatcgtgctagaattcgttatgcctctactactaacctaagaatttacgtaacggttgcaggtgaacgaatttttgctggtcaatttgacaaaacgatggatgctggtgccccattaacattccaatcttttagttacgcaactattaatacagcttttacattcccagaaagatcgagcagcttgactataggtgccgatacgtttagttcaggtaatgaagtttatgtagatagatttgaattaatccaagttactgcaaccttcgaggcagaatctgatttagaaagagcgcggaaggcggtgaatgccttgtttacttctacaaatccaagaggattaaaaacagatgtaacagattatcatatcgaccaagtatccaatctagtagagtgtttatcagatgaattctgcttggataaaaagagagaattactcgaagaagttaaatatgcaaagcgacttagtgatgagcggaatttactccaagatccgacttttacatccattagtggccaaacagaccgtggatggataggaagcactggtattagcattcaaggaggcgatgacatattcaaagaaaattatgtgagactaccaggtaccgttgacgagtgctatccaacgtatttgtatcaaaaaatagatgagtcacaattaaaatcttatactcgctatcaattaagaggctatatcgaagatagtcaagatttagagatttatttgattcgttacaatgcgaaacatgaaacattaagtgtgccaggtactgagtccccatggccatcttcaggagtatatccaagtggaaggtgcggagaaccgaatcgatgtgcaccacgaatcgaatggaatcccgatctagactgttcttgcagatatggagagaaatgcgttcatcattcccatcatttctccttggatattgatgttggatgtacagatttgaatgaggatctaggcgtatgggtgatatttaagattaagacacaagatggccatgcgaaactaggaaatctagaattcatcgaagagaaaccattattaggaaaagcgctgtcccgtgtgaagagagccgagaaaaaatggagagacaaatatgaaaaactacagttggagacaaaacgagtatatacagaggcaaaagaatctgtggatgctttatttgtagactctcaatatgataaattgcaagctaatacgaacatcgggataatccatggggcagataaacaggttcatcgaatccgagaaccgtatctttcagaattacctgtcattccgagtatcaatgcggccatttttgaagaattagagggccatattttcaaagcgtattctctatatgatgcaagaaatgtcataaaaaatggcgatttcaataatggtttatcgtgttggaacgtaaaagggcatgtagatgtacaacagaaccatcatcgttcggtccttgttctctcagaatgggaagcagaagtgtcacaaaaggtacgcgtatgtccagatcgaggctatatccttcgtgtcacagcgtataaagagggatatggagagggatgcgtaacgattcatgaattcgaagataatacggatgtactgaagtttagaaactttgtagaagaggaagtatatccaaacaacacggtaacgtgtaatgattatactacgaatcaaagtgcagaaggatctacggatgcatgtaattcctataatcgtggatatgaggatggatatgagaatagatatgaacccaatccttcagcaccagttaattacacaccgacgtacgaagaaggaatgtatacagatacacagggatataatcattgtgtatctgatcgaggatataggaatcatacaccattaccagctggttatgtaacactagaattagagtatttcccagaaacagagcaagtatggatagaaattggagaaacggaaggaacatttatcgtaggtagcgtggaattactccttatggaggaataggatacgttttaaagtgaaacgtatgcaaataaagaatgatcgctggcctatattgacagataaataaggaaattaatatatgaacaaaaacggacatcactcttaagggtatgatgtccgttttttatatgatttggtttaaagattgatatgtaaatatatttttttacgaaggctttacataaaaaagaatctttatagcaaaatttaaaattaaatcttacatatagctggattgaaaataaagcaaacttattaattgaattatataaaaagattaaatgctattcaagatcttaacattttgttaaatctacttcattaacgttacttaaatgtattttataataatatttagtaacttgtattggtattttaaattttttgattattaaaagacgttaaatataaaaacagaaagaaggaatgaatttggataataactccttattgaaaagtatgcattgagattataaaaactaaaatcgtggtattttttataataacaaccatgttttttttcat

SEQ ID NO: 276 - DNA, 1902 bp, Bacillus thuringiensis
  source 1..1902: mol_type = genomic DNA
atgaatagtgtattgaatagcggaagaactaccattcgtgatgcgtataatgtagtggctcatgatccatttagttttcaacacaaatcattagataccatacaaaacgaatggacggagtggaaaaaaaataatcatagtttatatgtagatcctattgttggaactgtggctagttttctgttaaagaaagtggggagtcttattggaaaaaggatactaagtgagttacggaatttaatatttcctagtggcagtacaaatctaatgcaagatattttaagagagacagaaaaattcctgaatcaaagacttaatacagacactcttgcccgtgtaaatgcggaattgacagggatgcaagcaagtgtagaagagtttaatcgacaagtagataattttttgaaccctaaccgaaacgctgttcctttatcaataacttcttcagttaatacaatgcagcaattatttctaaatagattaccccagttccagatgcaaggataccaactgttattattacctttatttgcacaggcagccaatttacatctttcttttattagagatgttattcttaatgcagatgaatggggaatttcagcagcaacattacgtacgtatcgagattacctgaaaaattatacaagagattactctaactattgtataaatacgtatcaaagtgcgtttagaggcttaaacactcgtttacacgatatgctagaatttagaacatatatgtttttgaatgtatttgaatatgtatctatctggtcgttgtttaaatatcaaagtcttctagtatcttccagttcgaatttatattcaagtggtagtggaccacagcagacccaatcatttacttcacaagactggccatttttatactctcttttccaagttaattcaaattatgtgttaaatggttttagtggtgctaggctttctaataccttccctaatatagttggtttacctggttctactacaactcacgcattgcttgctgcaagggtcaattacagtggaggaatttcgtctggtgatataggtgcatcgccgtttaatcaaaattttacttgtagcacatttctctcccctttgttaacgccatttgttaggagttggctagattcaggttcagatcgggagggtgttgccaccgttacaaattggcaaacagaatcctttgagacaactttagggttaaggagtggtgcttttacagctcgcggtaattcaaactatttcccagattattttattcgtaatatttctggagttcctttagttgttagaaatgaagatttaagaagaccgttgcactataatgaaataagaaatatagcaagtccttcaggaacacctggtggagcacgagcttatatggtatctgtgcataacagaaaaaataatatctatgccgttcatgaaaatggttctatgattcatttagcgccaaatgactatacaggatttactatttcgccaatacatgcaactcaagtgaataatcaaacacgaacatttatttctgaaaaatttggaaatcaaggtgattccttaagggttgaacaaagcaacacgacagctcgttatacgcttagagggaatggaaatagttacaatctttatttaagagtatcttccataggaaattccactattcgagttactataaacggtagagtttatactgctttaaatgttaatactactacaaataacgatggagttaatgataatggagctcgtttttcagatattaatatcggtaatgtagtagcaagtagtaatactgatgtaccattagatgtaaatataacattaaactccggcactcaatttgatcttatgaatattatgcttgtgccaactaatatttcaccactttattaa

SEQ ID NO: 277 - DNA, 1952 bp, Bacillus thuringiensis
  source 1..1952: mol_type = genomic DNA
tccatggatgaatccgaacaatcgaagtgaacatgatacaataaaaactactgaaaataatgaggtgccaactaaccatgttcaatatcctttagcggaaactccaaatccaacactagaagatttaaattataaagagtttttaagaatgactgcagataataatacggaagcactagatagctctacaacaaaagatgtcattcaaaaaggcatttccgtagtaggtgatctcctaggcgtagtaggtttcccgtttggtggagcgcttgtttcgttttatacaaactttttaaatactatttggccaagtgaagacccgtggaaggcttttatggaacaagtagaagcattgatggatcagaaaatagctgattatgcaaaaaataaagctcttgcagagttacagggccttcaaaataatgtcgaagattatgtgagtgcattgagttcatggcaaaaaaatcctgtgagttcacgaaatccacatagccaggggcggataagagagctgttttctcaagcagaaagtcattttcgtaattcaatgccttcgtttgcaatttctggatacgaggttctatttctaacaacatatgcacaagctgccaacacacatttatttttactaaaagacgctcaaatttatggagaagaatggggatacgaaaaagaagatattgctgaattttataaaagacaactaaaacttacgcaagaatatactgaccattgtgtcaaatggtataatgttggattagataaattaagaggttcatcttatgaatcttgggtaaactttaaccgttatcgcagagagatgacattaacagtattagatttaattgcactatttccattgtatgatgttcggctatacccaaaagaagttaaaaccgaattaacaagagacgttttaacagatccaattgtcggagtcaacaaccttaggggctatggaacaaccttctctaatatagaaaattatattcgaaaaccacatctatttgactatctgcatagaattcaatttcacacgcggttccaaccaggatattatggaaatgactctttcaattattggtccggtaattatgtttcaactagaccaagcataggatcaaatgatataatcacatctccattctatggaaataaatccagtgaacctgtacaaaatttagaatttaatggagaaaaagtctatagagccgtagcaaatacaaatcttgcggtctggccgtccgctgtatattcaggtgttacaaaagtggaatttagccaatataatgatcaaacagatgaagcaagtacacaaacgtacgactcaaaaagaaatgttggcgcggtcagctgggattctatcgatcaattgcctccagaaacaacagatgaacctctagaaaagggatatagccatcaactcaattatgtaatgtgctttttaatgcagggtagtagaggaacaatcccagtgttaacttggacacataaaagtgtagacttttttaacatgattgattcgaaaaaaattacacaacttccgttagtaaaggcatataagttacaatctggtgcttccgttgtcgcaggtcctaggtttacaggaggagatatcattcaatgcacagaaaatggaagtgcggcaactatttacgttacaccggatgtgtcgtactctcaaaaatatcgagctagaattcattatgcttctacatctcagataacatttacactcagtttagacggggcaccatttaatcaatactatttcgataaaacgataaataaaggagacacattaacgtataattcatttaatttagcaagtttcagcacaccattcgaattatcagggaataacttacaaataggcgtcacaggattaagtgctggagataaagtttatatagacaaaattgaatttattccagtgaattaatgaggatcca

SEQ ID NO: 278 - DNA, 3543 bp, Bacillus thuringiensis
  source 1..3543: mol_type = genomic DNA
atgaatccttatcaaaataaaaatgaatatgaaacattaaatgcttcacaaaaaaaattaaatatatctaataattatacaagatatccaatagaaaatagtccaaaacaattattacaaagtacaaattataaagattggctcaatatgtgtcaacagaatcagcagtatggtggagattttgaaacttttattgatagtggtgaactcagtgcctatactattgtagttgggaccgtactgactggtttcgggttcacaacacccttaggacttgctttaataggttttggtacattaataccagttctttttccagcccaagaccaatctaacacatggagtgactttataacacaaactaaaaatattataaaaaaagaaatagcatcaacgtatataagtaatgctaataaaattttaaacaggtcgtttaatgttatcagcacttatcataatcaccttaaaacatgggagaataatccaaacccacaaaatactcaggatgtaaggacacaaatccagctagttcattaccattttcaaaatgtcattccagagcttgtaaactcttgtcctcctaatcctagtgattgcgattactataacatactagtattatctagttatgcacacgcagcaaacttacatctgactgtattaaatcaagccgtcaaatttgaagcgtatttaaaaaacaatcgacaattcgattatttagagcctttgccaacagcaattgattattatccagtattgactaaagctatagaagattacactaattattgtgtaacaacttataaaaaaggattaaatttaattaaaacgacgcctgatagtaatcttgatggaaatataaactggaacacatacaatacgtatcgaacaaaaatgactactgctgtattagatgttgttgcactctttcctatttatgatgtaggtaaatatccaataggtgtccaatctgaacttactcgagaaatttatcaggtacttaacttcgaagaaagcccctataaatattatgactttcaatatcaagaggattcacttacacgtagaccgcatttatttacttggcttgattctttgaatttttatgaaaaagcgcaaactactcctaataattttttcaccagccattataatatgtttcattacacacttgataatatatcccaaaaatctagtgtttttggaaatcacaatgtaactgataaattaaaagctcttggtttggcaacaaatatttatatttttttattaaatgtcataagcttagataataaatatctaaatgattataataatattagtaaaatggatttttttataactaatggtactagacttttggagaaagaacttacagcaggatctgggcaaataacttatgatgtaaataaaaatattttcgggttaccaattcttaaacgaagagagaatcaaggaaaccctaccctttttccaacatatgataactatagtcatattttatcatttattaaaagtcttagtatccctgcaacatataaaactcaagtgtatacgtttgcttggacacactctagtgttgatcctaaaaatacaatttatacacatttaactacccaaattccagctgtaaaagcgaattcacttgggactgcttctaaggttgttcaaggacctggtcatacaggaggggatttaattgatttcaaagatcatttcaaaattacatgtcaacactcaaattttcaacaatcgtattttataagaattcgttttgcttcaaatggaagcgcaaatactcgagctgttataaatcttagtatcccaggggtagcagaactgggtatggcactcaaccccactttttctggtacagattatacgaatttaaaatataaagattttcagtacttagaattttctaacgaggtgaaatttgctccaaatcaaaacatatctcttgtgtttaatcgttcggatgtatatacaaacacaacagtacttattgataaaattgaatttctgccaattactcgttctataagagaggatagagagaaacaaaaattagaaacagtacaacaaataattaatacattttatgcaaatcctataaaaaacactttacaatcagaacttacagattatgacatagatcaagccgcaaatcttgtggaatgtatttctgaagaattatatccaaaagaaaaaatgctgttattagatgaagttaaaaatgcgaaacaacttagtaaatctcgaaatgtacttcaaaacggggattttgaatcggctacgcttggttggacaacaagtgataatatcacaattcaagaagatgatcctatttttaaagggcattaccttcatatgtctggggcgagagacattgatggtacgatatttccgacctatatattccaaaaaattgatgaatcaaaattaaaaccgtatacacgttacctagtaaggggatttgtaggaagtagtaaagatgtagaactagtggtttcacgctatggggaagaaattgatgccatcatgcatgttccagctgatttaaactatctgtatccttctacctgtgattgtgaagcgtctaatcgttgtgagacgtccgctgtgccggctaacattgggaacacttctgatatgttgtattcatgccaatatgatacagggaaaaagcatgtcgtatgtcaggattcccatcaatttagtttcactattgatacaggggcattagatacaaatgaaaatataggggtttgggtcatgtttaaaatatcttctccagatggatacgcatcattagataatttagaagtaattgaagaagggccaatagatggggaagcactgtcacgcgtgaaacacatggagaagaaatggaacgatcaaatggaagcaaaacgttcggaaacacaacaagcatatgatgtagcgaaacaagccattgatgctttattcacaaatgtacaagatgaggctttacagtttgatacgacactcgctcaaattcagtacgctgagtatttggtacaatcgattccatatgtgtacaatgattggttgtcagatgttccaggtatgaattatgatatctatgtagagttggatgcacgagtggcacaagcgcgttatttgtatgatataagaaatattattaaaaatggtgattttacacaaggggtaatggggtggcatgtaactggaaatgcagacgtacaacaaatagatggtgtttctgtattggttctatttaattggagtgctggcgtatctcaaaatgtccatctccaccataatcatgggtatgtcttaggtgttattgccaaaaaagaaggacctggaaatgggtatgtcacgcttatggattgggaggagaatcaagaaaaattgacgtttacgtcttgtgaagaaggatatattacgaagacagtagatgtattcccagatacagatcgtgtacgaattgagataggcgagaccgaaggttcgttttatatcgaaagcattgatttaatttgcatgaacgagtga

SEQ ID NO: 279 - DNA, 1470 bp, Bacillus thuringiensis
  source 1..1470: mol_type = genomic DNA
atgtttacaagtggtgcgaaaaataggttaaagctagaaacgacagattatgaaatagatcaagtggctaatgctatagaatgtatgtcagatgaacaatattcaaaagaaaaactgatgttatgggatcaagtaaaacatgcaaaataccttagtcagtctcgaaatttgcttcaaaatggtgattttgaagatgtatttcatggatggactacaagtgatcatatgtacattcagtcggataattctacttttaaaggaaattatctgaatatatctggggcgcgagacatatacttaacgatatttccaacatacatttaccaaaaaattgatgaatcaaaattaaaaccgtatacacgttacctagtaaggggatttgtaggaagtagtaaagatgtagaactagtggtttcacgctatggaaaagaaatagatacagtcatgaatgtaccatttgatatcccgtatgtatcttctaggcctgtttgtaatgaattatatgatggtgaacaacaaccgtatccaaatgggaatgtaggatattataatccaatgtcagcttttacgccttcttacacatctgatgctcgtcagtgtatgccagggaaaaaacagatagtctgtcaagattctcatcagtttaagttccatattgatacaggtgaagtagattataatacaaatatagggatttgggtcatgtttaaaatatcttccccagatggatacgcattattagataatttagaagtaattgaagaagggccaatagatggggaagcactgtcacgcgtgaaacacatggagaagaaatggaacgatcaaatggaagcaaaacgttcggaaacacaacaagcatatgatgtagcgaaacaagccattgatgctttattcacaaatgtacaagatgaggctttacagtttgatacgacactcgctcaaattcagtacgctgagtatttggtacaatcgattccatatgtgtacaatgattggttgtcagatgttccaggtatgaattatgacatctatgtagagttggatgcacgagtggcacaagcgcgttatttgtatgatacaagaaatattattaaaaatggtgattttacacaaggggtaatggggtggcatgtaactggaaatgcagacgtacaacaaatagatggtgtttctgtattggttctatctaattggagtgctggcgtatctcaaaatgtccatctccaacataatcatgggtatgtcttacgtgttattgccaaaaaagaagggcctggaaatgggtatgtcacgcttatggattgtgaggagaatcaagaaaaattgacgtttacgtcttgtgaagaaggatatattacgaaaacagtagatgtattcccagatacagattgtgtacgaattgagataggcgaaaccgaaggttcgttttatatcgaaagcattgaattaatttgcatgaacgagtaa

SEQ ID NO: 280 - DNA, 4377 bp, Bacillus thuringiensis
  source 1..4377: mol_type = genomic DNA
atggcaattttaaatgaattatatccatctgtaccttataatgtattggcgtatacgccaccctcttttttacctgatgcgggtacacaagctacacctgctgacttaacagcttatgaacaattgttgaaaaatttagaaaaagggataaatgctggaacttattcgaaagcaatagctgatgtacttaaaggtatttttatagatgatacaataaattatcaaacatatgtaaatattggtttaagtttaattacattagctgtaccggaaattggtatttttacacctttcatcggtttgttttttgctgcattgaataaacatgatgctccacctcctcctaatgcaaaagatatatttgaggctatgaaaccagcgattcaagagatgattgatagaactttaactgcggatgagcaaacatttttaaatggggaaataagtggtttacaaaatttagcagcaagataccagtctacaatggatgatattcaaagccatggaggatttaataaggtagattctggattaattaaaaagtttacagatgaggtactatctttaaatagtttttatacagatcgtttacctgtatttattacagataatacagcggatcgaactttgttaggtcttccttattatgctatacttgcgagcatgcatcttatgttattaagagatataattactaagggtccgacatgggattctaaaattaatttcacaccagatgcaattgattcctttaaaaccgatattaaaaataatataaagctttactctaaaactatttatgacgtatttcagaagggacttgcttcatacggaacgccttctgatttagagtcctttgcaaaaaaacaaaaatatattgaaattatgacaacacattgtttagattttgcaagattgtttcctacttttgatccagatctttatccaacaggatcaggtgatataagtttacaaaaaacacgtagaattctttctccttttatccctatacgtactgcagatgggttaacattaaataatacttcaattgatacttcaaattggcctaattatgaaaatgggaatggcgcgtttccaaacccaaaagaaagaatatcaaaacaattcaaactgtatcctagttggagagcgggacagtacggtgggcttttacaaccttatttatgggcaatagaagtccaagattctgtagagactcgtttgtatgggcagcttccagctgtagatccacaggcagggcctaattatgtttccatagattcttctaatccaatcatacaaataaatatggatacttggaaaacaccaccacaaggtgcgagtgggtggaatacaaatttaatgagaggaagtgtaagcgggttaagttttttacaacgagatggtacgagacttagtgctggtatgggtggtggttttgctgatacaatatatagtctccctgcaactcattatctttcttatctctatggaactccttatcaaacttctgataactattctggtcacgttggtgcattggtaggtgtgagtacgcctcaagaggctactcttcctaatattataggtcaaccagatgaacagggaaatgtatctacaatgggatttccatttgaaaaagcttcttatggaggtacagttgttaaagaatggttaaatggtgcgaatgcgatgaagctttctcctggacaatcgataggtattcctattacaaatgtaacaaaacaaaactatcaagtgcgttgtcgttatgcaagtaatagtgataatcctgttttctttaatgtagatactggtggagcgaatccaattttccaacagataaactttgaatctactgtagatagtaatatgggagtaaaaggagaaaatggcgtctatgtagtcaaatctattgctacaactgataattcttttacagtaaaaattcctgcgaagacgattaatgttcatttaaccaaccaaggttcttctgatatctttttagatcgtattgagtttattccttttaaactaacattatctcctactccaattactttagatccgatgaagaccattacagcttctgtcttaagtgcaactagggcctctgatggcataacaaccatcaatgatccagtagatggaactctactttctttacctatgggtacttccatcgattttagtattcttaatcctactcaaactggaacatatcaagtcagtattctctacaaatcttcatccggcggttttactattactaaagtaacaaatgatcaaaacggacagatggtagattatgcttcaacctcagaactacaatatagcaaccctatttacgtcttgtctagcaatacaggaaacactgtattgaccattggacctgggggatattccggcccagatttactcataaaagaaattagattcaccccagcaactccaaattcatcaaataaaattgatacagattttcagttagttgatgggcaaggcacagtaactatttggaaaagtgataaaattgcatatacactagcagatatagatatacagatttcctttaatcaaaccgcttggcaaagtcctaatattacaccttatttaaatgatgatccagtaggtggaatagcaactttttataatactactggtgaatcccaacattttactaaagatagtctactcttccaaagaggttttaacaatattcgggttaacaatggatttggtggtgccactatttctggtcatatgaaagcaaatgtaattgataatccttcttaaaaattaaggttcattttaaaaacttcaggttacaacgtttactattttaaatttacaaactaagggggccgcgtaatggtactatcacgtatagtcaatcccattttcaccgagcaagaagatttaaataatattataacgcaaatcaatgctctattcgtttctagtacacaagataaattaaaaccaggtgtgagtgattattggatcgaggaaattgtactgaaagtggatgccttatcagatgaggtatttggaacagaaaagaaggctttacgtaaattggtgaatcaggcaaaacgtttaagtaaagcaagaaatcttctgataggcggtagttttgaaaattgggatgcatggtataaagggcaaaaagtagtaagattatcggatcacgaactgttgaagagtgatcatgtattattaccaccaccaggattgtctccatcttatattttccaaaaagtggaggaatctaaattaaaagcaaatacacgttatacggtttctggatttattgcgcatgcaacagatttagaaattgtggtttctcgttatgggcaagaaataaagaaagtggtgcaagttccttatggagaagcattcccattaacatcaagtggaccagtttgttgtatcccacattctacaagtaatggaactttaggcaatccacatttctttagttacagtattgatgtaggtgcattagatgtagacacaaaccctggtattgaattcggtcttcgtattgtaaatccaactggaatggcacgcgtaagcaatttggaaattcgtgaagatcgtccattagcagcaaatgaaatacgacaagtacaacgtgtcgcaagaaattggagaaccgagtatgagaaagaacgtgcggaagtaacaagtttaattcaacctgttatcaatcgaatcaatggattgtatgacaatggaaattggaacggttctattcgttcagatatttcgtatcataatatagacgcgattgtattaccaacgttaccaaagttacgccattggtttatgtcagatagatttagtgaacaaggagatatcatggctaaattccaaggagcattaaatcgtgcgtatgcacaactggaacaaaatacgcttctgcataatggtcattttacaaaagatgcagccaattggacggtagaaggcgatgcacatcaggtagtattagaagatggtagacgtgtattacgattgccagattggtcttcgagtgtgtctcaaacgattgaaatcgagaattttgatccagataaagaatatcaattagtatttcatgggcaaggagaaggaacggttacgttggagcatggagaagaaacaaaatatatagaaacgcatacacatcattttgcgaattttacaacttctcaacgtcaaggactcacgtttgaatcaaataaagtgacagtgaccatttcttcagaagatggagaattcttagtggataatattgcgcttgtagaagtccctatgtttaacaagaatcaaatggtcaatgaaaataaaggtgtaaatataaatagcgatacaagtatgaacaacaatcaa

SEQ ID NO: 281 - DNA, 2097 bp, synthetic construct
  source 1..2097: mol_type = other DNA
atggcaaccatcaacgagctgtacccagtgccctacaatgtactcgctcacccaatcaaggaagtagacgatccttatagttggtctaacttgctgaagggaatccaagagggctgggaggaatggggaaagacgggccagaagaagctctttgaggaccatttgacaattgcgtggaacctgtacaagaccggaaagttagattacttcgcactcactaaggcttcaatcagtctgattggcttcatcccaggagccgaggctgcagtccccttcatcaatatgtttgttgacttcgtttggccaaagttgttcggcgccaacacagaaggaaaggatcaacagctcttcaacgcaatcatggacgctgtgaataagatggtcgataacaagtttctgtcctacaacttgtccacgctcaacaaaaccatagagggcctccaaggaaacttgggcttattccagaatgccatccaggttgctatctgtcaaggatctactcccgagcgcgtcaatttcgaccagaactgcacaccatgcaatcctaaccagccatgcaaggatgacctcgatagagtggccagtcgattcgacaccgctaactcacagtttacccagcatcttcctgaattcaagaatccatggagcgatgagaactccacgcaagaattcaagagaactagcgtcgaactcacacttcctatgtacaccactgtggccacactccaccttctcttgtacgaggggtacatagagttcatgaccaaatggaacttccacaacgaacagtacctcaacaaccttaaggttgagttgcagcaactcatccactcatacagcgagactgtgaggacatcttttcttcagttcttgccaaccctcaataaccggtcaaaatctagcgtcaacgcctacaatcgttacgtgaggaacatgactgttaactgtcttgacatcgctgcaacatggccgaccttcgatactcacaattaccaccaaggtgggaagttggacctcacacggatcatcctttcagataccgccggtccaatcgaggagtacactactggagacaagacctctggtcccgagcactccaacatcactcctaacaatatcttggatacaccgtcccccacctatcagcattctttcgtcagcgtggactccattgtctattctaggaaggagctccagcaacttgatatcgctacttacagcacaaacaactccaataactgccatccttacgggttgagactctcttacaccgacggtagcagatacgattacggagacaaccagcctgatttcactacatccaataacaactattgtcacaattcttacaccgcaccgattactcttgttaacgccagacacttgtacaacgctaaaggaagcctacagaatgtggaatccctcgtggtctctacagttaacgggggtagcgggtcctgcatttgcgacgcatggattaactatttgcgtcccccacaaacctctaagaacgagtccaggcctgaccagaaaatcaacgtgctatacccaattactgagacagtgaacaagggtaccgggggcaatctgggagtaatctcggcttacgttcctatggagttggtgccagagaacgtcattggtgacgtgaacgcagacaccaagttgcctctgacacaattgaaggggttcccattcgagaagtatggtagtgaatacaataaccgtggaatctcgctcgttagagaatggatcaatggaaacaacgcagtcaagctgtccaattcgcagtccgtcgggatacagattaccaatcagactaaacagaagtacgagatccgttgccgatatgcttcaaagggggataacaatgtttacttcaacgtggacttgtctgagaacccctttcgcaatagtatttcattcgggtccacagaatcatctgtggttggcgtccaaggggagaacggcaagtacatcctcaagagtattaccactgtggagatcccagccggatcattctatgtccacattacaaaccagggctcctcagacctgttcttggataggatcgaattcgttcctaagattcagtaa

SEQ ID NO: 282 - DNA, 3393 bp, Bacillus thuringiensis
  source 1..3393: mol_type = genomic DNA
atgattcaaaaaaactatgaaattataggtgcttcaacaaacggcataaccgaattacctgaagattacaacactatagtcagcccctatgatgctccagcatccgttactacaactattgaaattactggaaccatactaagcgatttaggtgtttcaggggcatcatcagttagtttacttttgaataaacttttaaatatattatggccaaataatgccaatactgtgtgggggacattcgcaaaagagaccgctgatcttctaaatgaagtgttatctgtggatgatccagtagtaatagaagcaaatattaatttagaagggctaaaaagcacccttgatttatatttagaggcacttaaagaatggaaaaatgatccccaaaatccagcatcccaagagcgtgtcagaactagatttcgtaatgtggatgatgattttacacatgatatgccttcctttgctagagctggatatgaaacgaagctattaacagtttatgcacaagctgcaaatcttcatttacttttattaagagatgcttctatgtttggagaaggttggggaatgtctcaagtaaacataaatgataactataatcgccaattacgattgacggctcaatatacggatcatagtgtaaagtggtataacgcaggactagaaaaattaaaagggaattcaactagggaaaattggtatacttgtaatagatttcagagagaaatgacgttaatggtgttagacgtagttgcattatttccaaactacgatacacgaatgtacccgatcgcaacgtcatcagaacttacaagaatgatttatacagatccaattgcttatacacaaagcgatccatggtacaagataacatctctttctttttcaaatattgaaaacagtgcgattccaagtccatctttcttcaggtggctaaaatccatttcaattaatagccagtggtggggcagtggtcctagtcaaacctactattgggttggacatgaattggtatattctaattcaaattataatcaagcacttaaggttaaatatggagaccccaattcttatattgagccccctgattctttcagcttttcttctaaggatgtttacagaaccatctctgtcgttagaaattcaataagtaattatatagtaagtgaagttcaattcaattagtaatacacataaaattagtgagaaatttataaacatcaatcaaattgggatagaagagaaacaaaagattcaattactgaactatccttagctgctaatcccccaacaacatttggaaatgtagcagaatacagtcatagattagcatatatttcagaggcataccaaagtcacaacccatcaaaatacccaacctacatacctgtattcggttggacgcacacaagcgtacgttacgataataaaatttttccggaaaaaatcactcaaattccagctgttaaaagcccttcagctgaaggttgatcatggcaaaatatagtaaaaggtcccgggtttactgaaggagatgtgacaactgctgtttcgccagcaactgtaaccgacataataaaaatacacgttactctagatccaaattcactttcacaaaaatatcgtgcatgacttcgctatgcttccaatgcatttgtagcagctacattgtatacaaatacaagtagtaattataattttgaacttacagaaagtacaactgaacagtttacaacatataattcatacaagtatgtagatattccaggttcaatacaatttaataatacttctgatacagtgtctgtttatttgcatatggattcaacaactaatgcaaccgttcatgtagatagaattgaattcattccagtagatgaaaattacgataacagagtaagactagaaaaagcacagaaatctgtgactgccttgtttacagcgggaagaaatgcactccaaacggatgtgacagattttaatgtagatcaggtttcaattttagttgattgtataccacgggcattatatcctaatgagaaacgcgaactactaagtttagtcaaatatgcaaaacgtttgagctattcccgtaatttcctcctagatccaacattcaattctatcaattcatcagatgagaatggctggtacggaagtaatggtattgcaattggcagtgggaatattttattcaaagggaactatttaattttctcaggtgccaatgatgaacagtatccaacctatctctatcaaaaaatagacgaatctaagttaaaagaatatacacattataaactgacaggttttatcgagagtagtcaggatttagaagcatacgtgattcgttatgatgcaaaacatcaaacaatggatgtatccaataatctattctcagatattactcctgtaaatgcatgcggagaaccaaatcgttgtgcggcactaccatacctggatgaaaatccaagattagaatgtagttcgatacaagatggtattttatctgattcgcattcgttttctctccatatagatacaggttcaattgatttcaatgagaacgtaggaatttgggtgttgtttaaaatttctacacctgaaggatatgcgagatttggaaacctagaagtgattgaagatggcccagtcattggagaagcattagcccgtgtgaaacgccaagaaacgaagtggagaaacaagttaacacaactgcgaacggaaacacaagcgatttatacacgagcaaaacaagccattgataatttattcacaaatgcacaggactctcacttaaaaataggtgctacatttgcgtcaattgtggctgcaagaaagattgtccaatccatacgtgaagcgtaaatgtcatggttatctatcgtcccaggtgtaaattatcccatttttacagaattgaatgagagagtacagcaagcatttcaattacatgatgtacgaaatgtcgtgtgtaatggccgattccttaatggaacatctgattggattataacctctgacgtaaaggtacaagaagaaaatgggaataacgtattagttctttccaattgggatgcgcaagtattatacaatgcatgaagctctatcaataccacggatatatcttgcgtgtaacggcacgtaaagaaggattgggagaaggatatattacaattacggatgaagaagggcatacagatcaattgacatttggtgcatgtgaggagatagatgcatcctaacacgttcgtatccacaggttatatgacaaaagaactagaatttttcccagatacagagaaggtgcgtatagaaattggagaaacagaagaaatattccaggtggaaagtgtagaattatttttgatgaaagatctatgttaa

SEQ ID NO: 283 - DNA, 3525 bp, Bacillus thuringiensis
  source 1..3525: mol_type = genomic DNA
atgagtccaaataatcaaaatgaatatgaaattctagatgcttcatcatctacttctgtatccgatagttctgttagataccctttagcaaacgatcaaacgaccacattacaaaacatgaactataaagattgtctgagaatgtctgagggagagaatcctgaattatttggaaatccggagacgtttattagttcatctacggttcaaactggaattggcattgttggtcaagtactgggggctttaggggttccatttgctggacagatagctagtttttatagtttcattgtcggtcaattatggccatcaagtaccgtgagtgtatgggaaatgattatgaaacaagtggaagatctaattgatcaaaaaataacagattctgtaaggaaaacagcgcttgcaggactacaaggattaggagatggcttagacgtatatcagaaatcacttaagaattggctggaaaatcgtaatgatacaagagctagaagtgttgtggtgacccaatatatagctttagagcttgattttgttgctaaaatcccatcttttgcaatatctggacaggaagtaccattattatcagtgtatgcacaagcagcgaatttacatttgctattattacgagatgcttccatttttggagcagagtggggattcacaccaggagaaatttccacattttatgatcgtcaggtgacacgtaccgcccaatactcggattattgtgtaaagtggtataacactggcttagataaattaaaaggtacgaatgctgcaagttggctgaagtatcaccaattccgaagagaaatgacattactggtattagatttagtagcgttatttccaaactatgacacacgtacgtatccaatcgaaacaacggcccaacttacacgggaagtgtatacagatccaatagtatttaacagagaaacaagtggtggattttgtaggcgttggtcacttaacagtgatatttctttttcagaagtcgaaagcgctgtaattcgttcaccacacctatttgatatactcagtgaaatagaattttatacaacaagagcggggcttcccttgaataatacggaataccttgaatattgggtaggacattctataaaatataaaaatacgaatgcctcatcagcattagaacgtaattacggtacgattacttctaacaaaatcaagtattatgatttagcaaataaggatatctttcaggttcgatcattaggggcggatttagctaattactacgcacaggtatatggagttccgtacgctagttttacactgcttgacaagaatacaggatcaggatcagttggaggttttacgtactcaaaaccacatacaactatgcaagtatgtacacaaaattacaatacgattgatgaaatccctccagagaatgagccacttagtagagggtatagccatagattatctcatatcacctcttattctttttctaagattgctagtagtcctgctagatatggcaatctccctgtatttgcttggacacatcggagtgcggatgttacaaatacagtttattcagataaaattactcaaattccagttgtaaaagggatcgacctcgggagcacaagtacgattgtaaattttgaatacaatggaggaagtatagtcaaagatactaaatcatcaactcataataactctctttcacgaatagtgagtttaatgataaaaaccgaggatccaaatccaaattcccgctctttatatcgtattagggttaagtatgctgctgatgtgcctggaactttccgactgcatattcaaaatacttccccggttacagtaccctttactgcgacgatgagcggtactaatttacaatacagttcctttaaatatatagaatatataggttactttaataatagagaagttggtttttctattgagtcaagtacatcacagggtagaacacgtaatgtatatatcgacaaaatcgaattcatcccggtagatgcgacatatatagcagaagaagacctagaggtggcaaagaaagctgtgaatggcttgtttacgaatacaaaagatgccttacagacaagtgtaacggattatcaagtgaatcaagcggcaaacttagtagaatgcctatccgatgagttatacccaaatgaaaaacgaatgttatgggatgcagtgaaagaggcgaaacgacttgttcaggcacgtaacttactccaagatacaggctttaataggattaatagagaaaacggatggacgggaagtacgggaattgagattgtggaaggagatgttctgtttaaagatcgttcgcttcgtttgacaagtgcgagagagattgatacagaaacatatccaacgtatctctatcaacaaatagatgaatcacttttaaaaccatatacaagatataaactaaaaggttttataggaagtagtcaagatttagagattaaattaatacgtcatcgggcaaatcaaatcgtcaaaaatgtaccagataatctcttgccagatgtactccctgtcaattcttgtggtgggatcgatcgctgcagtgagcaacagtatgtagacgcgaatttagcactcgaaaacaatggagaaaatggaaatatgtcttctgattcccatgcattttctttccatattgatacaggtgaaatagatttgaatgaaaatacaggaatttgggtcgtatttaaaattccgacaacaaatggatacgcaacactaggaaattttgaattggtagaagaggggccattgtcaggggaaacattagaacgagcacaacaacaagaacaacaatggcaagacaaaatggcaagaaaacgtggggcatcagaaaaagcatattatgcagcaaagcaagccattgatcgtttattcgcagattatcaagaccaaaaacttaattctggtgtagaaatgtcagatatgttggcagcccaaaaccttgtacagtccattccttacgtatataatgatgcgttaccagaaatccctggaatgaactatacgagttttacagagttaacaaatagactccaacaagcatggaatttgtatgatcttcgaaatgctataccaaatggagattttcgaaatggattaagtgattggaatgcaacatcagatgtgaatgtgcaacaactaagcgatacatctgtccttgtcattccaaactggaattctcaagtgtcacaacaatttacagttcaaccgaattatagatatgtgttacgtgtcacagcgagaaaagagggagtaggagacggatatgtgatcatccgtgatggtgcgaatcagacagaaacactcacatttaatatatgtgatgatgatacaggtgttttatctgctgatcaaactagctatatcacaaaaacagtggaattcactccatctacagagcaagtttggattgacatgagtgagaccgaaggtgtattcaacatagaaagtgtagaactcgtgttagaagaagagtaa

SEQ ID NO: 284 - DNA, 3525 bp, Bacillus thuringiensis
  source 1..3525: mol_type = genomic DNA
atgagtccaaataatcaaaatgaatatgaaattatagatatggcaccttctacatctgtaaccaatgattctaacagatacccttttgcgaatgagcccacaaatgcattacaaaatatgaattataaggattatttaagaatgtctgagggatattctcctgaatatttaacaagcctaagtccttacagccagtttggcacagttgataagatcatcagtattattagtctattgaatagtgctgcaggtattcctggtcttgatttttttactggattgctgcaatttattcttgacttctttgcaccagaggatccgtgggcagagttaatggaactagtggaacaactcatagatcaaaaaataacagttgctacaagagaaaaggcgctcgcagaattaagaggactgataaatggataccttgtatatcagcaatcattagaaagttggctggaaaatccaaatgctacaagagctagtatagttcgagaacaatatgtcgctttagaacttgattttgttacttcgatttcatcttttgcgatagctggacaggaagtaccgttattagccgtgtacgcacaagctgctaatttacatttgttattattgagagatgtgtcaatatttggagaagaatggggattaacagtaaatgaggttaataccttctatattcgtcaaatgacttatacaactgagtatagtgattattgtgtaagaatttataatactggcttaaataaattaaaaggatctagtgcatctagttgggttgattataatcgctttcgtagagaaatgaacttactagtactagatattattgcgttatttccaaactatgatgttcgtaggtatccaatggaaacaacaacggaattaacaagagtagtttacactgatccaattgtgtttgacgaaaggaagggggtggcgtcgactcatagttggacggcgattgcaccatctttctcaagtatagaatctctaactcgacgaccaggattatttacatggttagatcaactaactattttttcgaaacgcatatcgcaacctagtgtatttataaatagttgggcggggcataagattagcacctttagaacacaaaaaacagatatactcataaataccacccatggagatactaataatcctataaaagaatttgtagtagataccaaaaaagtagaagatatttatcaaacgatagcatacccacatgcagtagcaaatgaagtattctatttattcggtgtcccaaaagttgattttaatatggtacctgcaggtggctctgcaaactctgcacacaccctcattttttctgatagtacgggagggagactggaaagtattacgaagaactcagaagcagaattacctccaacagagtcattatcagatacacctcaaccaaaccaagtaacttattctcacagattagattatgctacaataattaaagcaaataaaagttatggaagtgggtatattccattattaggttggacccatcggagtgtagatcgtaataatacaatttatccgaataaaatcactcaaataccagcagtaaaagctttctcatatactgaatcatttaatgtaaatgttattgcaggtccaggattcacaggaggagatttaataagtttaggtcatttagagaatatttatatgaaattaaacgttccaaatcctcaaaaattccgtgttcgtattcgttatgctgctagtacaacttcgtatttgcaaataactgggctatctaatttagctcagtctgatcgtttcgaacagacgtattctaatgaaaatgaaaacaatttgatgtttgaaaattttcaatatgtagaacttagaaatattttttcggtagatgctccattagaaaatcatcaagtaagtatacaaaattatcaaggtaatggttttgttattatagaccgaatcgaattcatcccagtaaatgcaacatatgaggcagaacaagatttagattcggcaaagaaagcagtgaataccttgtttacgaatacaaaagatggtttacgaccaggggtaacggattatgaagtgaatcaagcggcaaacttagtggaatgcctatcggatgatttgtatccaaatgaaaaacgcttgttatttgatgcagtgaaagaggcaaaacgactcagcgaggcacgtaacttactacaagatccagatttccaagagataaatggagaaaatggatggaccgcaagtacaggaattgaggttgtagaaggagatgctctatttaaagggcgttatctacgcctaccaggtgcgagagaaatggatacagaaacgtatccaacgtatctgtatcaaaaagtagaggaaggtgtattaaaaccatacacaagatatagattgagagggtttgtcggaagcagtcaaggcttggaaatttccacaattcgtcatcagacgaaccgaattgtaaaaaatgttccagatgatttattaccagatgtacctcctgtaaactctgatggtagaatcaatcgatgcagcgaacaaaagtatgtgaatagccgtttagaaggagaaagaggattaccaaatgggaatcgttctgctgaagcgcatgaattctctctccctattgatataggagagctggattacaatgaaaatgcaggaatatgggttggatttaagattacggacccagagggatatgcaacactcggtaaccttgaattggtagaagagggaccattgtcaggagacgcactagaacgcctgcaaagagaagaacaacagtggaagcttcaaatgacaaaaagacgtgaagagacggatagaaaatatacggcagcaaaacaagcggtagatcgtttatatgcagattaccaagatcaacaattgaatccaaacgtagaaattacggatattactgcggcccaaaacctgatacagtccattccttatgtatataatgaaatgttcccagaaatacaagggatgaactatacgaagtacacagagaaaacaaatcgactccaacaagcgtggggtttgtatgatcaacgaaacgccataccaaatggtgatttccgaaatgaattaagtaattggaatacaacatctggtgtaaatgtacaacaaatcaacaatacgtctgtcttagtcatgccaaactgggatgggcaagtttcgcaacagtttacagttcaaccgaatcaaagatatgtattacgagttactgcaagaaaagaaggggtagggaatgggtatgtgactatccgtgatggtggaaatcaaacagaaacgcttacgtttagtgcaagcgattataacacagatagtgtgtataatacgcaagtgtcgaatacaaatgggttgtacaatgagcaaacaggatataccacaaaaacagtgacattcatcccatatacagatcaagtgtggattgagatgagcgagaccgaaggtatgttctatatagaaagtgtcgaattgattgttgacgtagagtaa

SEQ ID NO: 285 - DNA, 3474 bp, Bacillus thuringiensis
  source 1..3474: mol_type = genomic DNA
atgagtccaaataatcaaaatgagtatgaaattatagatgcgtcatcacctacttctgtatctaataactcagtgaaataccctttagcaagtgatcaaacgaccacattacaaaatatgaactataaagattatctgagaatgtctgagggagagaatcctgaattatttggaaatccagagacgtttattagtgcgcaggatgcggttggaactgggattgatattgtgagtaaactactaggtagtttaggggttccacttgttgggcaagccgcaacggcacttaaatggattataggtaaattgtggccttcttcaggaaacccgtgggatgatttgatgacggcagtagaagaactcataaatcaaaaaatagaagcatatgcaagaagtaaggcacttgctgaattgggtgtttcgggaagagctgtaaaatcctatcaaaccgcacttgaagagtggcaaaaaaacccgaataacgcgcgaagcgcagcacttgtaagggaaagattttcagatgcagaacatacattgcgtactcaaatgagtttatttaccgttcgtggttatgaaattccgcttttagcaacatatgcacaagctgccaatttgcatttgtttgtaatgaaggatattcaaatttacgggagagaatggggatatactcagggagatattaaccttttctatcgagaacaagtagaatttacaggggaatactctgattattgtgttaagtggtacaatgctggcttagataaattaagaggctcgactgctctacaatggattaactataatcgtttccgcagagaaatgacagtgatggcactggatatagttgcattattcccaaattatgacatacgcatgtatccaatgaaaacaaccgcagaattaacgcgaagaatttatacagatccgcttggttatacgggaagtgggtctaacacgccaccatggtataattatggatattctttctcatggatagaaaataatgccatgccagcacctggattgttccagtggttacaaggaattgggatttatactaaatttgctcgtataactccattttatgcgaactattggtcaggacatactgtattttataaatttactaacgattctactgagagacgtgttcagtatggagatacagatactccagaattagatagttcttcctttgaaaatgttgacatttataaggtttcagcatcagttggttcgtacaaaagtaataccgtactattaccaacttttaaagctacttttgagggggtaaatcaaaataatcagttaaagacctttaggtatcaaaaagaatctaatgtcccaagtcaaacgaaaaactcaaccacagagctgcctgttcagttatcaactccgcctacttacggagattctgaacagtacagtcatagactagcctatgtttttgatgccccaatcgattcatatacaggcatatatcgcatgtatggatttgcccctattcttggttggacacatattagtgtaagtcgtgacaataggattgatccagataaaattactcaaattccagctgtaaaggcatatgctgagggtcttgctaattatatcaaagatccggggtttacaggaggagatttattagctttaggtagaaactcaaatacttcattgattgttaatttttcgaagcctcaaacataccgtattcgtattcgttatgctgctagtaaaacttcgtattttcaactacgtgggctgcataatatagctcagtctcagcgtttcgaagcgacgtattctaataaaaatgaaaacgatttgacatttaacgattttaaatatgtagaaattcaaaaaactgtttcaatagacaatccatcagaaagtcgtagtataagtatatacactcaatcagatacagaattacttattatagacaaaatcgaattcatcccagtagatgcaacatttgaagcggaacaagacctagatgtggcaaagaaagcggtgaatggcttgtttacgaatacaaaagatgccttacagacaagtgtaacggattatcaagtcaatcaagcggcaaacttagtagaatgcctatccgatgagttatacccaaatgaaaaacgcatgttatgggatgcagtgaaagaggcgaaacgacttgttcaggcacgtaacttactccaagatacaggctttaatgtaataaatggagaaaacggatggacgggaagtacgggaattgaggttgtggaaggagatgttctgtttaaagatcgttcgcttcgtttgccaagtgcgagagagattgatacagaaacatatccaacgtatctctatcaacaaatagatgaatcgcttttaaaaccatatacaagatatagactaagaggttttataggaagtagtcaagatttagagattaaattaatacgtcatcgggcaaatcaaattgtcaaaaatgtaccggataacctcttgccagatgtacgccctgtcaattcttgtggtggagtcgatcgctgcagtgaacaacagtatgtagacgcgaatttagcactcgaaaacaatggagaaaatagaaatatgtcttctgattcccatgcattttctttccatatggatacaggtgaaatagatttaaatgaaaatacaggtatttgggtcgtatttaaaattccgacaacaaatggatacgcaacattaggaaaccttgaattggtagaagaggggccattatcaggagacgcactagaacgcttgcaaagagaagaacagcagtggaagcttcaaagaaccaaaagacgtgaagagacggatagaaaatatatggcagcaaaacaagccattgatcgtttattcgcagattatcaagaccaacaactcaattctggtgtagaaatgtcagatttgcttgcagctcaaaaccttgtacagtccattccttatgtgtataacgaaatgttcccagaaatccctggaatgaactatacaaatttcacagagttaacaaacagactccaacaagcatggaatttgtatgatcttcgaaatgctataccaaatggagattttcgaaatggattaagtgattggaatgcaacatcagatataaatgtgcaacaactaaacgatacatctgtccttgtcattccaaactggaattctcaagtgtcacaacaatttacagttcaaccgaattatagatatgtattacgtgtcacagcgagaaaagagggagcaggagacggatatgtgatcatccgtgatggtacaaatcagacagaaacactcgcatttaatacatgtgataatgatgcaggtgttttatctactaatcaagctagctatatcacaaaaacagtggaattcacaccatctacagagcaagtttggattgacatgagtgagaccgaaggtgtattcaacatagaaagtgtagaactcgtgttagaagaagagtaa

SEQ ID NO: 286 - DNA, 2094 bp, Bacillus thuringiensis
  source 1..2094: mol_type = genomic DNA
atgaatccatatcagaataagaatgaatatgaaatattggatagttcacaaaataactttaatatgtctattaatcatttacaatatccattaaaaaatagtccatatcctcaattttctatagacaattgtaggcgtagtaatactgctacttgggttaataatattggggatgcagttagtgaatcaatatctttggtgtcaacaatattggggatttttacagaacctaatttgtggggagtattttctgcattaattggtcttctagataggatgagaggtgctctgggaacaccttctatagctgcattatctatatgtgatttgctagaaattattgatgaacgagtaaatcggagtgttttgaatgacggaatcgctgattttaatggttcattagctctatttggaaatttcttgtccgcattaaattcctggagaaataatccaaacaatagtactgctgatgagcttcgttttcgttttagagcatctgattcagaatttgataggagtttaacaaatggatctttaacacatggtggttcattagctagacaggatgcacaaatattattattaccttcttttgcaaaagctgcatattttcacttatttttattaaatgaggctattacaagtggatctaattggggtctggagattaggcctactataaattatcaagaaaaattagaaaatagtattagaaattacaccaattattgtgtacattggtacaatcagggtttagaggaaatacgccgccggaataatagtggtgaaaattggttagtatttcacagattccgtagagatatgacattgcaagtattagatctagtagcaacatttccgaattttgatactaatcgatattctacttcaatgccaataactactcaattaagtagggtgatttatacagatccaatcggttgtgtaagtcaatcccatctaaatagtaattggtttggcccagtaaatggtactaattttacaagtttagaaaatgaaattcctagtcctaccctttctcaatttttaaattctatagatttagttgatcagccgcttagatggggtgttggaactaatggaggaaatacatggcaaggaaatacaaatagttttaatttttcctcttcatctactgttttccatgaaagttatggaagacgaactggtcagaatattatccgtgggctgaatggtagggatgtttttagaatagattcgagacctatttctctagatggtcatacattcggagttaatagagtagaatttcatcatactactagttctcaaaactctatatatacaggatatttgagaacatccggacttaatagaccagtggttcagaatgtccggacgtttttaccaggagaaaattctgatataccaaatcgagaagattatactcatagattaagtagggtagcaaatataacaggtgggcttcgacatgtagcagttcgtgaggatcaaagttcttctttattgttatatggctggacacataaaagcttaactcgtgaaaatatgtataatcttaatgaaatttttcaaatacctgctgtaaaaacaatgaacacacctggtattcaagtaattgcaggacctggatctacaggtggggatttattaagactaaatcttggtgctagagtaacttataattgtagacctgctcgtccattagaaacaccaatggtagtacatgtacgtgttcgttatgctagtgtaggaagttctacaataagaatagagtttactgatccatctggttcatttaatccacaaacacttgctttacctgatacaaattcatcattaaataatcttcaatatcaaaatttcaacatggttaccactaatttcgcacgtggtacgagtataatgcaaggtaatttttcaataagtattataaatatgaatggagctaatttagctttagataaaattgaaattataccggttcgtattggtcgaaacacctcagaacaagtaaaagaatttattgataaactgggttgtgttgcaaagtttgaaaaatatagttatagtttaagcggttctgaataa

SEQ ID NO: 287 - DNA, 2028 bp, Bacillus thuringiensis
  source 1..2028: mol_type = genomic DNA
atgaatccatatcaaaataagaatgaatatgaaatattcaatgctccatccaatggttttagcaagtctaataactattctagatatccattagcaaataagccaaatcaaccactgaaaaacacgaattacaaagattggctcaatgtgtgtcaagataatcaacaatatggcaataatgcggggaattttgctagttctgaaactattgttggagttagtgcaggtattattgtagtaggaactatgttaggagcttttgctgcccctgtcttagctgcaggtataatatcttttgggactttgttgccgatcttttggcaaggatctgaccctgcaaatgtttggcaggatttgttaaacatcggaggaaggcctatacaagaaatagataaaaacataattaatgtactaacttctatcgtaacacctataaaaaatcaacttgataaatatcaagaatttttcgataaatgggagccagcacgtacacacgctaatgctaaagcagtacatgatctctttactaccttagaacctataatagataaagatttagatatgttaaaaaataatgctagctatcgaataccaacactccctgcatatgcacaaatagctacttggcacttgaatttattaaaacatgctgctacctattacaatatatggctgcaaaatcaaggtataaatccaagtactttcaattcatctaattactatcagggctatttaaaacgtaaaatacaagaatatactgactattgtatacaaacgtacaatgcaggactaactatgattagaactaatactaacgcaacatggaatatgtataatacttaccgtttagaaatgactctaactgtgttagatcttattgctatttttccaaattatgacccagaaaaatatccaataggagttaaatctgaacttatcagagaagtttatacgaatgttaattcagatacatttagaaccataacagaactagaaaatggattaactagaaatcctacattatttacttggataaaccaagggcgtttttacacaagaaattctcgagacattcttgatccttatgatattttttcttttacaggtaaccagatggcctttacacatactaatgatgatcgcaacataatctggggagcggttcatggaaatattatttctcaagacacatccaaagtatttcctttttatagaaacaaacctattgataaggtcgaaattgtcagacatagagagtactcagatataatatatgaaatgatatttttttcgaatagcagtgaagtatttcgatattcatccaattcaacaatagaaaataattataaaagaactgattcttatatgattccaaaacaaacatggaaaaataaagaatatggtcatactctatcgtatataaaaactgataattatatattttcagtagttagagaaagaagaagagttgcatttagttggacacatactagtgttgatttccaaaatacaatagatttagataacatcacccaaatccacgctctaaaagctttgaaggtaagttctgattcgaaaattgtgaaaggtcctggtcacacaggtggagacttggtaattcttaaagatagtatggattttagagttagatttttaaaaaatgtttctcgacaatatcaagtacgtattcgttatgctactaatgctccaaagacaacagtattcttaaccggaatagatactataagtgtggagctccctagtaccacttcccgccaaaacccaaatgctacagatttaacatatgcagattttggatatgtaacatttccaagaacagttccaaataaaacatttgaaggagaagacactttattaatgaccttatatggtacaccaaatcattcatataatatatatattgacaaaatcgaatttattccaatcactcaatctgtattagattatacagagaagcaaaatatagaaaaaacacagaaaatagtgaatgatttatttgttaattaa

SEQ ID NO: 288 - DNA, 1941 bp, Bacillus thuringiensis
  source 1..1941: mol_type = genomic DNA
atgaattatatggaagatagttctttagatactttaagtatagttaatgaaacagactttccattatataataattataccgaacctactattgcgccagcattaatagcagtagctcccatcgcacaatatcttgcaacagctatagggaaatgggcggcaaaggcagcattttcaaaagtactatcacttatattcccaggttctcaacctgctactatggaaaaagttcgtacagaagtggaaacacttataaatcaaaaattaagccaagatcgagtcaatatattaaacgcagaatatagggggattattgaggttagtgatgtatttgatgcgtatattaaacaaccaggttttacccctgcaacagccaagggttattttctaaatctaagtggtgctataatacaacgattacctcaatttgaggttcaaacatatgaaggagtatctatagcactttttactcaaatgtgtacacttcatttaactttattaaaagacggaatcctagcagggagtgcatggggatttactcaagctgatgtagattcatttataaaattatttaatcaaaaagtattagattacaggaccagattaatgagaatgtacacagaagagttcggaagattgtgtaaagtcagtcttaaagatggattgacgttccggaatatgtgtaatttatatgtgtttccatttgctgaagcctggtctttaatgagatatgaaggattaaaattacaaagctctctatcattatgggattatgttggtgtctcaattcctgtaaattataatgaatggggaggactagtttataagttattaatgggggaagttaatcaaagattaacaactgttaaatttaattattctttcactaatgaaccagctgatataccagcaagagaaaatattcgtggcgtccatcctatatacgatcctagttctgggcttacaggatggataggaaacggaagaacaaacaattttaattttgctgataacaatggcaatgaaattatggaagttagaacacaaactttttatcaaaatccaaataatgagcctatagcgcctagagatattataaatcaaattttaactgcgccagcaccagcagacctattttttaaaaatgcagatataaatgtaaagttcacacagtggtttcagtctactctatatgggtggaacattaaactcggtacacaaacggttttaagtagtagaaccggaacaataccaccaaattatttagcatatgatggatattatattcgtgctatttcagcttgcccaagaggagtctcacttgcatataatcacgatcttacaacactaacatataatagaatagagtatgattcacctactacagaaaatattattgtagggtttgcaccagataatactaaggacttttattctaaaaaatctcactatttaagtgaaacgaatgatagttatgtaattcctgctctgcaatttgctgaagtttcagatagatcatttttagaagatacgccagatcaagcaacagacggcagtattaaatttgcacgtactttcattagtaatgaagctaagtactctattagactaaacaccgggtttaatacggcaactagatataaattaattatcagggtaagagtaccttatcgcttacctgctggaatacgggtacaatctcagaattcgggaaataatagaatgctaggcagttttactgcaaatgctaatccagaatgggtggattttgtcacagatgcatttacatttaacgatttagggattacaacttcaagtacaaatgctttatttagtatttcttcagatagtttaaattctggagaagagtggtatttatcgcagttgtttttagtaaaagaatcggcctttacgacgcaaattaatccgttactaaagtag

SEQ ID NO: 289 - DNA, 1941 bp, Bacillus thuringiensis
  source 1..1941: mol_type = genomic DNA
atgcaaaataacaactttaataccacagaaattaataatatgattaatttccctatgtataatggtagattagaaccttctctagctccagcattaatagcagtagctccaattgctaaatatttagcaacagctcttgctaaatgggctgtaaaacaagggtttgcaaaattaaaatccgagatattccccggtaatacgcctgctactatggataaggttcgtattggggtacaaacacttttagaccaaagattacaagatgacagagttaagattttagaaggtgaatacaaaggaattattgaggtgagtaaagtttttactgattatgttaatcaatctaaatttgagactggaacagctaataggcttttttttgatacaagtaaccaattaataagcagattgcctcaatttgagattgcaggatatgaaggagtatccttttcactttttactcagatgtgtacatttcatttgggtttattaaaagatggaattttagcaggaagcgattggggatttgctcctgcagataaagacgctcttatttgccaattcaatagatttgtcaatgaatataatactcgactgatggtattgtactcaaaagaatttggacggttattagcaaaaaatcttaatgaagccttgaactttagaaatatgtgtagtttatatgtctttcctttttctgaagcatggtctttattaaggtatgaaggaacaaaattagaaaacacgctttcattatggaattttgtgggtgaaagtatcaataatatatctcctaatgattggaaaggtgcgctttataaattgttaatgggagcacctaatcaaagattaaacaatgttaagtttaattatagttatttttctgatactcaagcgacaatacatcgtgaaaacattcatggtggcctgccaacatataatggaggaccaacaattacaggatggatagggaatgggcgtttcagcggacttagttttccttgtagttatgaattagaaattacaaaaataaaacaggaaataacttacaatgataaagggggaaatttcaattcaatagttcctgctgctacgcgcaatgaaattctaactgctaccgttccaacatcagctgatccattttttaaaaccgctgatattaactggaaatatttctctccgggtcttttctctggatggaatattaaatttgatgatacagtcactttaaaaagtagagtaccaagtattataccttcaaatatattaaagtatgatgattattattttcgtgccgtttcagcctgtccaaaaggcgtatcacttgcatataaccatgattttttaacgttaacatataataaattagaatatgatgcacctactacacaaaatatcattgtaggattttcaccagataatactaagagtttttataggagcaactctcattatctaagtacaacagatgatgcctatgtaattcctgctttacaattttctacagtctcagatagatcattcttagaagatacaccagatcaagcaacagatggcagtattaaatttacggatactgttcttgggaatgaggcaaaatattctattagactaaatactggatttaatacagctactaggtatagattaattatacgttttaaagcgcgtgctcgtttggctgctggtatacgtgtacgttctcaaaattcagggaataataagttattaggtggtattcctgtagagggtaattctggatgggtagattatattacagattcatttacttttgatgaccttgggattacaacttcaagtacaaatgctttctttagtattgattcagatggtgtaaatgcttctcaacaatggtatttgtctaaattaattttagtaaaagaatccagttttacgactcagattccattaaaaccatag

SEQ ID NO: 290 - DNA, 4391 bp, Bacillus thuringiensis
  source 1..4391: mol_type = genomic DNA
gaaaattcgagaattaatcagacatgcaggcgccaaaaacgtagtattggatggcagagatggagtaatgaatatctctatggtgtactagggctctattgggactggaaagttcgtccccttgaaagctcaggaagatattgataaaagtgtctgccatttgataggtctcataacccttttgatgaagtttatggggtgagctgcttgagggaaaacctcacgagcagttcttatggggaggggctggaaacgggttataactgataccgcgccagtcctttacccgacaacgaacttttgcttggttagaaaattaccgcaggctttggaaaaactgtgaacgaacacttgaaaatagcagacaaagttgcttattggcagctgtggctattttattaaaaagattccaaacaggttctcagaaaatagttgtaattcatcttgaatcgaaagattcataaaaaacgtcatcctttctagctttttagaaagaataacgttttttgacacttgggggtagtcttatttcttaagttgatgggcatgcaacagaaccctaaaaaatcaataattcaacaaaaataatggggatatttgttgaattattgcaacaggaatacatacgtagattgcgaatatttagaagtacaccctacatattattggttaggtggaatgaattataaaaaatgatgggaataagggaggaacgaagatgcattattatgggaataggaatgaatatgacatattaaatgcttcatcaaacgattcaaacatgtctaatacttatccgaggtatccgttagcaaatccacaacaagatttaatgcaaaatacaaattataaagattggcttaatgtatgtgaagggtatcatatagaaaatcctagagaagcaagcgttagagctggacttggtaagggattaggtatagttagtacaatcgtagggttctttggtggttctattatcttagatacaattggattgttttaccaaatttcagagctactttggccagaggatgatacccagcaatacacttggcaagatattatgaatcatgtagaagatcttatagacaaacgaataactgaggttatacgaggaaatgcaattagaacattagcagatttacagggtaaagttgatgattataacaattggttgaagaaatggaaagacgatccaaaatctacaggtaatttaagcaccttagtaaccaagtttacggctcttgattcagattttaatggtgctataaggacagttaataatcaggggagtccaggttatgagttacttttattgcctgtctatgcacaaattgcgaatctgcatttacttttattacgggatgctcagatttatggagataaatggtggagcgcacgagctaatgctcgtgataattattaccaaatacaattagagaaaacaaaggaatatacagaatattgtataaattggtataataagggtttaaatgattttagaacagcaggtcaatgggtaaactttaatcgttatcgtagagaaatgactcttactgtattagatattatttcaatgttccctatttatgacgcgagattatatcctacagaagtaaaaaccgaactaactagggaaatttattcagatgttattaatggggagatatatggacttatgactccttatttttcttttgagaaagctgaatcactttatacaagggcaccccatctcttcacttggctaaaaggatttcgatttgtaaccaattctatttcttattggacatttttatcaggtggtcaaaataagtattcttatactaataattctagtattaacgagggctcttttaggggacaggacacagattatggtgggacttcttctaccattaatattccatcaaattcgtatgtatataatttatggacggaaaattatgaatatatttatccttggggtgatcctgtaaatattacaaaaatgaatttttctgtaacagataataattcttcaaaagaattaatttatggtgcacacagaacgaataaacctgttgttcggacagattttgattttctcactaataaagagggaactgagttagcaaaatataatgattataatcatattttatcctatatgttaattaatggggaaacgtttggtcagaaacgtcatggttattcgtttgcttttacacatagtagtgttgatcctaataataccattgcagcgaataaaattacgcaaattcctgtagtgaaagcttcgagtataaatggatcgatttcaattgaaaaaggtcccggatttacgggaggagatttggtaaagatgagagcagattcaggtttaactatgcgttttaaagctgaattattagataaaaaatatcgtgttcgaatacgttataaatgtaactacagttctaaattaatactacgaaaatggaaaggggaaggttatatacaacaacaaattcacaatatttctcccacatatggagccttttcttatttagagtcttttactataactacgacagaaaatatatttgatttgacaatggaggtaacatatccgtatggtagacagtttgttgaagatataccatctcttatattagataaaatcgaattcctcccaactaactgataccattcacaggaaatatgaggaaaaatatgaattagaaagatcacaggaaacatttaatagtatatttgttgattaaaacaaagtactaacgtagatggtatagctgtttgaaaaaataagaaaaaaggttgtgaattttatgcttacaagtggtgcgaaaaatatgttaaaactcgaaacgacagattatgaaatagatcaaatggcgaatgctatagaaaatatgtcaggtgaacaatattcacaggaaaaaatgatgcaatggcatgacataaaatatgccaaacaattgagtcaagcacgtaatttacttcaaaatggtgattttgaggatttatttagtggatggactacaagtaatcagatgtccattcaggcagataatgcaacttttaaagggaactatctgcatatgtctggggcgagagacatatatggaacgatattcccaacgtatatataccaaaaaattgatgaatccaaattaaaaccgtatacgcgttatctagtcaggggatttgtgggaagtagtaaagatctagaattaatggtaatgcgttatggaaaagaaattgatacagtaatgaatgtaccaaatgacataccgtacgtaccttctatgccggtctgtaacgaattatatgatggtcaacaaccgtatccaaataggcatgtaggatattataatccaatgccagtttctcagccttcttacacatccgatacttgtcagtgtacgcccggcaaaaaacatgtggtatgtcatgattctcatcaattcaagtttcatattgatacgggggaagtagattacaatacaaatctaggaatttgggtgttgtttaaaatctcttcacccgatggctacgcgacattagataatttagaagtaattgaagagggaccagtaagaggcgaagcagtgacacatgtaaaacaaaaggaaaagaaatggaatcagcaaatggagaaaaagcgcatggaaacaaagcgagtctatgaccgagcaaaacaggcggtagatgcattatttacaggagaagagttaaactatgatgttacattgtcacacattaagaacgccgatgatttggtacagtcgattccatatgtacacaatgagtggttaccggattttccaggcatgaactatgatatataccaagagttaaacgcgcgtatcatgcaagcacgctatttatacgatgcacgaaatgtcataacaaatggggattttgcacaaggattacaagggtggcatgcggaaggaaaagtagaagtacagcaaatgaacggaacgtctgtattagtcttatccaattggagctctggagtatctcaaaaccttcatgtccaacatccacatggatatctgttacgtgtgagtgcgaaaaaagaagggtctgggaaaggctatgtaacgaggatgagttgtaatggtaagcaggaaacacttacgtttacgtcctgtgacggaggatatatgacaaaaacggtagaggtattcccagaaagtgatcgtgtacgaattgaaattggggagaccgaaggttcgttttatattgaaagcatcgaattgatttgtatgaacggatatactagcaataataaccagaatatgagtaatatgtatgatcaaagttatagtgggaattatagtcagaatactagcgatatgtatgatcaaggaggttctgttgcaaagtttgaaaaagaatagaat

SEQ ID NO: 291 - DNA, 3668 bp, Bacillus thuringiensis
  source 1..3668: mol_type = genomic DNA
gactttttttgactatatgcatggcctctattccaacaatcatttttgtagctgtgcgccatgatttgaatccaagcatattccagattcattttttgataaatctatggtcttgttcaattatgttgtttacatatttttttacccgtagcggcatatcatttggtatatttttttcattttttaattctcgtatcgcaacaggataggctttatcaccatcaattgtgattacacgaggttttgtgacatgacaagaagccaatgctttctttagaaaacgcttggtagccttcgcatctcgtttcttacccaaataaaaatcaagggtgtttccttcggaatcgacagcaccatataggtacattttttcgcctttgatttttaggtatgtttcatcctgatcacgcacctttttttagtagtagtaccagtatggccaagttagaaaaatcattttcaagtttttttatgcttttgtaccagaaccgaatatttacctagatctataaatacgtataagattgataaatgttatacattctttcaattacttagtagtgacttccttaagcctacacataatatggattatagaaatattagtatagtgggaggaatcaaaatgaattcttatcagaataagaatgaatatgaaatcttagatgctaagcgaaatacttgtcacatgtctaattgttatcccaagtacccattagcaaatgatcctcaaatgtatttgcgcaacacccattataaggattggataaatatgtgcgaggaagcttcttatgcatcttcaggtccttcacaattatttaaagttggaggttctatagttgctaaaattcttggaatgattcctgaagttggtcctcttttaagttggatggtatctttattttggccaactattgaagaaaaaaatactgtttgggaagatatgataaagtatgtagcaaatctgctaaaacaagaattaacaaatgatacacttaaccgtgccactagtaatttatctgggttaaatgaatctttgaatatatataaccgagctctcgctgcgtggaaacaaaataaaaataatttcgcaagtggtgaacttataaggtcatatataaatgatcttcatatactctttacaagagatattcaatcagatttctcattaggaggttatgaaacagtattattaccttcatatgcaagtgctgccaatcttcatttacttttgttacgtgatgttgcaatttacggaaaagaattaggatatccatcaactgacgtagagttttattataatgagcaaaagtactatacagaaaaatatagtaattattgtgtaaatacgtacaaatcgggtttagaatcaaaaaaacaaataggatggtcagattttaatcgatatcgtagagaaatgactttatccgtattagatatagtcgcattattcccactgtatgatacaggactgtatccgagtaaagatggcaagatacatgttaaagctgaactaacaagagaaatctactctgatgttattaatgatcatgtatacggactcatggttccctatatatcttttgaacatgctgaatctctgtacactcgcaggccgcacgcatttacttggttaaaaggatttagatttgtaacgaattctattaatagttggacctttttatcaggtggtgaaaatagatatttccttactcatggagagggtactatttataatggaccttttttggggcaggatactgaatatggaggaactagttcttatatagatatctctaataattcctctatttataatttatggaccaaaaattatgaatggatttatccatggactgatccagttaatattacaaaaataaatttttctataacagataatagtaattctagtgagtctatttatggtgcggaaagaatgaataagcctactgttcgaacggattttaattttcttcttaacagagcaggaaatggtcctacgacatataatgattataatcacattttatcttatatgttaattaatggagaaacgttcggacaaaaaagacatggttattcatttgcatttactcatagtagtgtagataggtataataccattgtcccagataaaattgtgcaaatacctgctgtgaaaactaatttggtcggtgcgaatataataaagggtcctggtcatacaggtggcgatttacttaaactagaatatgagcgttttcttagtttacgtattaagcttatagcatcaatgacttttcggattagaattagatatgcttctaatatttctggacaaatgatgattaatataggttaccagaatcctacttattttaatattatccctacgacaagtagggactatactgagttaaaatttgaagatttccaattagtggacacatcctatatttactcaggtggcccatcgattagttcaaatacattatggctggataatttttctaatggacctgttattatagataaaattgaatttataccgttgggaattacactaaatcaagcacaaggttatgatacatacgaccagaatgctaatggtatgtatcatcaaaactacagcaattctggctataattataatcaagaatacaatacttattaccaatcgtataacaattaggttgtgttgcaaagtttgaaaaaacacaaccttgtgtgcaaaatatagttatagtttaagcggttctgaataactcctgtaattccttgtacgtcgaaaaagagaagtctggaatgtgacttctcttttgtttgtatatcgcatgaatcgtttcgattcctttcaatgtacgtgaagcatggcggagattttgaaatcctgcggatttaacaaaacggcgcttgatatgtctatgatcttgttcaatgagattatttagatgcttaacggtacaatgtttcgtatgtacatacaaaccgttatgtttcagttttttgagcgcacaaagtaaagcaggagccttgtctgtagtaagaaccgttggttctccaaaatctttaaccagtcgcttcataaacatataagcggcttgatgattgcgtgttttacgaagttgaatatccaaagtatgcccatctccaccaatagcacgataaagatagcgccattcgcctttcactttgatgtaagtctcatctaaatgccatatgaaatgtgcggatttgtttttctttttccaaatttgataaatcagattgccgtattcgtgaacccaacgcatgatggttgttggatgaactgatattccacgttctttcaagatttcagatacatcacgatagcttaaagaaaaacgacaatagtagccaacggctaccaaaataatatcttttttgaattgttttcccttaaaatatcccatgtgatatgctcctcatcccattttctctatataagttccgtttaatattttaacaattgttcagtccctaacctttgaagtaccttttcaggaaattgagaaagatgttctagaaaagaaagaacggatgtttttatttctttctgggatgcatgaaaacgattagagataacactttcttttaatgctttccaaatacgttccaataaattcaaattgggagaatacggcggtaaaaagacgagtgttgac

SEQ ID NO: 292 - DNA, 4807 bp, Bacillus thuringiensis
  source 1..4807: mol_type = genomic DNA
gcttcatttaaaaaactttgcaacagaacctcagtacatttgtttctttttatacgcacatatacatgcctgttttgcatataatattttggtgatattcttcataaaaaaggagtgattttattggtacagttatctgatttattacctagttattataatgtattagcttctccccctacaattttagatgctaaccaagactggttccccacaggtaatgatttcaaaagtgtaataaatgagctgaaagatgcttttactaaatttcaaaaagattttcatactagcgaccttattaacactatacaatccatttataactcttatggctctcaaggaatggattgggtcaatgtggctcaagctgtaataacttttgcttttggttttgtacccggtggatcattagtctctgcaggacttaataaaataataggtatatttttccccaaagaccctaatcctactgtatttgatcaaataaaagccgcagtagaacaattaatactcaattcatttatcacatatgatatacagggcgatataactgaattgaataaactgaaagattattctggaatattagcaaattctatacaagtagcgcttggtcaatcccaatttcaagaattccaacaagtaaatcctactgggccaccgacaaattgtactcataccccctcttgtactttagatccaactaaccctattccaccaaattgtagctgtttattgaattttgtatatcaaaattataataatcacacttccgatataaacacggtattacttcaaatagaaggttctattccaaagatttttgctcttattaatcaatccacaacagcaactactgctcaaaaaaaccaactaaaatctgattatttacaagcatatcttcctttatatgtaatgggcgcaactttagaaatgatatactatagaacatatattcaatttgctgaaacatttcagtatggtttaagtgaacaaaatagtactacactaacggctatgcacaacttacgtcttacaatttctagacgaactacatttctattcaataattttctcccatttttaccaagtataacttcaaatacaaaaggagatttaaattcatatattcaatatacaagacgtataacaataaatgctctggatactgctgtattttggactttactagatccatttgattatcctgtgtccgcaaatcaaacattatcccgtattatttttaatgatattgtaggaccagtagaatgtaaagctggtaaccaaaatagcaataacttactattcaatttttataacgtagatgggcaaccacttccaaataactctattactaattatttttataataatatgcaattaagaggtttgcaattccaaatatataaatatagttcaacctctacttatttctcgacaacatctgatattccaattggatttaaagcttcttatcgtacaaatggtagcgataaaaatattgatcatacacgttctctaccatacggactaaaaggatctacaacaacattaactgatgatatatatatcacgaatcctagttttaatattataaatatgaactcctctcaaacatcaggtcaaattgctacagatgtctcacaaattctatatacacctatttcagatataaaacaaaattgtttttctcaaaacagtccttatttagggaataatagaattcaagctatttatcctctacaacccactaatccaaacacttataatgcttatggtagtacagataaactcggatttttaactacactcatttcaaatgacaccactacaaaccttgtatttacttctgatcctatttatacatttcctgccgaacaagctactgtattatctggaacaaaacttgttgaatatgtgaatggtacagcttctgttcaattacaaaatgggcaaaatgctcaatacacgatagataatacaacaagaattgcaggtcctacacaatttcaattacgagtacatgtagcgacagatccagcagttacagatccaaatgttttaggacaactcgctattacaattgataatcaacgaacacaatatttaactatacccaatacaaatgttgattatagtaatccaataactcttttaaacggtcaacaacttaaccaattacgggtaaaaggaacacaaggtgcttatatgttagtacccgctagtaatctaaataatatcaatgatcgtaataccaatgtttttacattaaatccaaatgcatctatgaatgtaaatattcaaaatacaggaaatctaacagttatattagatcgtattgaattcgttcctatcgattcaacagtaataatcccagcacaaacactatattcaaatcaagcttatactctttgggaatcaacaaatggattaattggaaaacaggctttattagtagtagatgattatttacattttactgttcaatattattaccaatctcaattagtccattctaatgaacaaaatatatatgatgttaattatattggtctatttgataaaattacggctagtactatcgctgatactttagtaaaccttacaaatggaattgtttatttaactactaatacaacaccaacaccaacaccagctgtaccaagcccaattcctcctatatccaatcaaaatataggagctggatttgaatatactgtttgggatggtaataacaaaactggaaataccgtaaattttcaaggattcgctgcaccaaatagtggttccgaaggtttattatttcaatataaatataatgatcaagtaattgacacagatcaagtatcaaaccaattttctatccaacgtaaattagcaggtacaattaataaaattacagcaacaggtggaacaccaaatggagtgtatttaacgataaataatggtggttccgtgagtacaacataaaaaggaggaaaataaaatgaatccatgttctccattccaaaatatacctcaaaggaatttaaatcttcctgtttttattacaaaacaagaattagaacaaattactaaaatggtatctaacttatttttaacaacaaatcctgctttattacattgtttaccacctgatattacgttattagctcctcatgttagtgattattggattgatcaattactaatgaaagttgataaactgtcaactgaattatatggtgtcgaaaaacaagaattacgaaaattattaaatatagccaaacaaatgagtgttgcacgaaataaattaataggtggaaactttgaaacagtagaggcttggacattcggtacacaagcaactgttctttccaattcacctttatttgtagggaattttctatctttagaacctacaaatggtatatggacttcctacgcatttcaaaaaattaatgaatctcaattaaaaccatttacacgttatagtatttctggttttatcgctaatagtcaagggttagaacttacaatttcacgatacggaacagaattacaaactgttataaacattccaattgaaacagcacttcctatttatccaaatccaattccaaattgttgccagccaagtccatgtggatgcgattcttgtcaatatagagattcacatctttttaactattcaattaatgtaggtactttatttccagaattaaatcctggtattgaaattagtttacgcataatcgaaccaaacggaagagccagaattagtaatttagaagtaatagaagagcgtcctcttacagaagaagaaagaagacaaattcaacgaacagaacaattatggctaacaagagtagaaagagaactaaaaatcatttgtgatttatttgaaccaattattaaacaaattaactcctactttccagaaggggattggaacaatcacattttttctcatgtcacatatcaagatttatatagtattgtcataccggcactcccgatcattgaaaattggtctatgacgcatttgacaggtatgtataatcatctagtacgaccgattaaagaagtgatccaacaaattgaacaacaattagaagctcgaaatttacttcataatggaaatttttcaaatggactgacagattggactgtttgtggtgaagcaaccataatacctttaacaaatcaaaatcaagctttattcctttcttattgggattctatggtttcacaaactgttacagttgtaaattttaatccagataaattgtatttattacgtatctatgcaaaaggaaatggaactgttcttgttcaacataatggacacacagaacgtgttaacttcacacaagatttcttccaatcaaaagaacatactttttatctagatatggcaacctttaccgtagatattcaatccaattcaaatgattttacagtagattatgtagaaattatagaaatataaaataaacaaaactacatgtttttacttcatgtagttttttctctctttcttactctattcaagaaacgaggtgattgtatgcaaaaaaaaacaattttaataaattcttcttccacttctagcccctctccttccacctcttctttttcttcttctcaattactacaacaaggatataccaaaaaacaaggttgtaattgtaataaatagacaaacaaaaatagtgtatttaaaaaagttgcaaagtttgagaaatcataagtctgtttacaaaatactcttgtcatttaagcggttctgaataatggctataattctttctacgtcgcaaaagag

SEQ ID NO: 293 - DNA, 2169 bp, Bacillus thuringiensis
  source 1..2169: mol_type = genomic DNA
atgaaagaacaaaatctaaataaatatgatgaaataactgtacaagcagcaagcgattatatcgacattcgtccgatttttcaaacaaatggatctgctacatttaattctaataccaatattacaactttaacacaagctataaatagtcaagcaggagcaattgcaggaaagactgctctagatatgagacatgactttacttttagagcagatatttttcttggaactaaaagtaacggagcagacggtattgcaatcgcatttcatagaggatcaattgggtttgttggaacaaaaggcggaggacttggaatattaggtgcacctaaagggatagggtttgaattagacacatatgcgaatgcacctgaggacgaagtaggcgattcgtttgggcatggggcaatgaaaggatcattccctagtttcccaaatggatatccccatgctggctttgtaagtactgataaaaatagtagatggttatcagccctagctcagatgcagcgaatcgctgctccaaacgggcgttggagacgtctggagattcgttgggatgctcgtaataaagagttaactgcaaatcttcaggatttaacttttaatgacataactgttggagagaagccacgtactccaagaactgcaacttggaggttagtaaatcctgcatttgaacttgatcagaagtatacttttgttattggttcggcgacgggtgcatctaataacctacatcagattgggattatagaatttgatgcatactttactaaaccgacaatagaagcgaataatgtaaatgtcccagtgggagcaacatttaatccaaaaacatatccaggaataaatttaagagcaacagatgagatagatggggatttgacatcgaagattattgtgaaagcaaacaatgttaatacgtcgaaaacgggtgtgtattatgtgacgtattatgtagagaatagttatggggaaagtgatgaaaaaacaatcgaagtaactgtgttttcaaaccctacaattattgcaagtgatgttgaaattgaaaaaggggaatcttttaacccactaactgattcaagagtaggtctttctgcacaggattcattaggcaatgatattacccaaaatgtaaaggtaaaatcgagtaatgtggatacttcaaagccaggggaatatgaagttgtatttgaagtgacagatagctttggtggaaaagcagaaaaagatatcaaggttacagttttaggacagccaagtatagaagcgaataatgttgaattagaaatagatgatttatttgatccattaacagatgcaaaagtaggtctccgtgcaaaggattcattaggtaatgatattacgaaagacgtaaaagtaaagttcaataacgtagatacttcaaattcaggaaagtatgaagttatatttgaagtgacggaccgttttggaaaaaaagcagaaaaaagtattgaagtccttgttctaggagaaccaagcattgaagcaaatgatgttgaggttaataaaggtgaaacgtttgaaccattaacagattcaagagttggcctccgtgcaaaagactcattaggtaatgatattacgaaagatgtgaaaataaaatcaagtaatgtggatacttcaaaaccaggtgaatatgaagttgtatttgaagtgacagatcgttttggtaaatatgcagaaaaaacaattggagttatagtgccagtaattgatgatgaatgggaagatggaaatgtgaatggttggaaattctatgctgggcaagatattaaactgttgaaggatcctgataaagcctataaaggcgattatgtattctatgattctagacacgttgctatttctaaaacaattccactaacggatttgcaaataaatacaaactatgaaattacagtgtatgctaaagcagaaagcggcgatcatcacttaaaagtgacgtataagaaagacccggcaggtccagaagagccgccagttttcaatagactgattagcacaggcacattggtagaaaaagattatagagaattaaaagggacgttccgcgtaacagaattaaacaaagcaccattgataatcgtagagaattttggagctggatatataggtggaattagaattgtgaaaatatcgtaa

SEQ ID NO: 294 - DNA, 3711 bp, Bacillus thuringiensis
  source 1..3711: mol_type = genomic DNA
atggacccaaatgatcataatgaatatgaagtcatggatactggcagcatgggctatcagccaaggtatccccttgcgaatgcacctggtgctgaattgcaacagatgcattacaaagattggatggatatgtgtacgtatggggaatcagtagcattatccgaggggcttagggctgcgctatttgttgctaatagtattatagggataatgctttcaaagattccaattgtgggtcctatagtatcaacaccctttcaaataatgggcgcagtacttccattcttgtggccgccaaacgcacccgaggcccaattttcatgggaaagcctgatgacagctgcggaagagattgctgataaaaagatcgacgcacaggtacgagctaatgcgaatgcagaattagaaggagttcataacgctatacgactctatcaagatgccgtttgcgattggaaacaagatcctaccaatgcccaactgaaggaacaactccgaatacaatatattgctacgaataccgttatctttagtagaatgccgtcttttcgagtacgaggatttgaagtcccattactcagcacttatgtgcaagcggctaatttacatttaatccatttaaaagatggagttcaatttggagaagaatggggaatggactcagcaacagttgatcgattttatagctacctaaaatcagatatagaaatctatacgaattattgtatagattggtataataaagggttatcggatagtatagaatctgaacccacttggaatggttggaatacgttcaataatttccgcagggatatgactcttatggtccttgatttagtttcgatatggccaacatatgacccgagacgctatccccttcctaccaaatcacaattgacacgagaattatatacacaagctatagggagttataaaagtgttgagcctcttctgccccctccatctccatttagatggttacgtgaaatagagttttttttaagagacagtcaggatgaggtggaacagtttgctggttttcaacaggggtatcaatacacgcttgacaccaccatctatcgtccaccagtagttggtacacggacttccctagttgatagtattgctatgggactgggttctgatgatgtagtgtatagaataaagaatatttcctacaatggatggtttccaaaaaaacttgatttttattatactccttccgaacgcgttgaaagtgtaggagagattcgtactgatgctaataatatgattgattatatcggacttggttgtagggcgaaggtgactgaaccttgtgatccttgtacgactaattgtacgattgatactgtgaatacaaccgcatcttgtgacaatcctaatctttatagccatcgattgtcatcgataaacccaagtgctccatacccgggtcaaaattggatgtttagcttttgctacggctggactcatttcagtgtagatgacaacaatttgatagcggctgacagcattactcaaatccccgcagtgaaagcctatagaatagggggatatggcaaagtaatgaaagggcctggttatacaggcggggatttaatggtgttttatggggcaggggaaatcaactggagacttaccattccggacacgacaaaggcttatcgagtgcgagctcgtgtggcaacaatccctacttctcagcctgtagatacagtgaggtataatcagtttgaatacagggatatagaagtaatatctccaacaactactgtacatgagtattccataggattcgatatcactggtgatgactgggggctgttggacaaaatcgaattcatcccaattgaaggatccgtggaagaatatgaagcagaccaagctttagaaaaagccagaaaggcagtgaacgccttgtttacaggtgatgcgaaaaatgccttacaattgaacatcacagattacgcagtggaccaagctgccaaccttgtcgaatgtgtatcagaggagttccatgcccaagaaaaaatgatcctcttagaccaagtcaaatttgccaaacgactcagtcaagcacgcaatctattaaactacggagactttgaatcgtcagattggtctggagagaatggatggagaacaagtcctcatgtccatgtcgcatctaatcatccaatctttaaagggcgctatctccatatgccaggtgcgacaagttctcagttttctaaccatatctatccaacttatgtatatcaaaaggtggatgaatcaaaattaaaatcctatactcggtacatggtacgcgggtttgtcggcaatagtaaggacctagaattactggtagaacgatatggaaaagatgtccacgtggaaatggatgtaccaaatgatattcagtatacgttaccaaggaacgaatgtggtggctttgatcgatgcaaaccagcatcctatccaacaagcacttctcacacatgcacatgtaaagatacggctccaatgcatacggattgtcagtgtcaggacaagatgaatcgtactttggcagatacgtatcacaatgaatcatcgagtcgtgtgatgtatgcggacggattccatgctcatacgtcctgtggatgtaagaacagtgacaggtatcaaaacggaacacgtccatctaaatcttgtggatgcaagaacccacatgtcttcacataccatattgacacaggatgtgtggatcaagaagaaaaccttggtttgtggttcgctttgaaaattgcgagcgaaaatggtgtcgcaaacattgataacctagaaatcattgaagcacagcagttaacaggagaggcgttagcgcgtgtgaaaaaacgggaacagagatggaaacaagaaatgacaaaaaaacgtttagaaacagagaaagctgtacaagcagcgcaaggtgcgattcagaatctgttcacaaacgcgcagcacaatcgtctgaaatttgaaacgctattccctcaaattgtccatgcagagaagctcgttcaacagattccctatgtgcatcacccattcttgagcggggcgctgccaactgtaccaggcatgaattttgaaatcatccaacaactattggcagtgatcggaaatgcccgtgcattatacgagcaacgaaatctcgtgcgtaatggtacattcagctcaggtacaggaagttggaaagtgacagaaggggtaaaagtgcagccattgcaaaacacatctgttcttgttctgtccgaatggattcatgaagcgtcccagcagttacacattgatccaaatcgcgggtatgtgttacgtgtaacagcgcgaaaagaaggcggaggaaaagggactgtaacaatgagtgactgtgcagactatacagagacactgacctttacatcatgtgactttaacacgtctggttcccaaacgatgacaagtggtacattatctggatttgtgacgaagacgctagaaatcttcccagacacagatcgtatccgtattgacatcagtgaaacagaaggtacgtttaaaatagaaagtgtggaactcatttgtatggaacacatggaagaccacatgtatgatatcgccggaaatgtggtggaagagatgcgttacctagattcatctcgttcgatgggtggtacattagatgcgatgtgttatacaaaaattggagagtttggttgttag

SEQ ID NO: 295 - DNA, 1158 bp, Bacillus thuringiensis
  source 1..1158: mol_type = genomic DNA
atgttagatactaataaagtttatgaaataagcaatcttgctaatggattatatacatcaacttatttaagtcttgatgattcaggtgttagtttaatgagtaaaaaggatgaagatattgatgattacaatttaaaatggtttttatttcctattgataataatcaatatattattacaagctatggagctaataattgtaaagtttggaatgttaaaaatgataaaataaatgtttcaacttattcttcaacaaactctgtacaaaaatggcaaataaaagctaaagattcttcatatataatacaaagtgataatggaaaggtcttaacagcaggagtaggtgaatctcttggaatagtacgcctaactgatgaatttccagagaattctaaccaacaatggaatttaactcctgtacaaacaattcaactcccacaaaaacctaaaatagatgaaaaattaaaagatcatcctgaatattcagaaaccggaaatataaatcctaaaacaactcctcaattaatgggatggacattagtaccttgtattatggtaaatgattcaggaatagataaaaacactcaaattaaaactactccatattatatttttaaaaaatataaatactggaatctagcaaaaggaagtaatgtatctttacttccacatcaaaaaagatcatatgattatgaatggggtacagaaaaaaatcaaaaaacatctattattaatacagtaggattgcaaattaatatagattcaggaatgaaatttgaagtaccagaagtaggaggaggtacagaagacataaaaacacaattaactgaagaattaaaagttgaatatagcactgaaaccaaaataatgacgaaatatcaagaacactcagagatagataatccaactaatcaaccaatgaattctataggacttcttatttatacttctttagaattatatcgatataacggtacagaaattaagataatggacatagaaacttcagatcatgatacttacactcttacttcttatccaaatcataaagaagcattattacttctcacaaaccattcgtatgaagaagtagaagaaataacaaaaatacctaagcatacacttataaaattgaaaaaacattattttaaaaaataa

SEQ ID NO: 296 - DNA, 1164 bp, Bacillus thuringiensis
  source 1..1164: mol_type = genomic DNA
atgatagaaactaataagatatatgaaataagcaataaagctaatggattatatgcaactacttatttaagttttgataattcaggtgttagtttattaaataaaaatgaatctgatattaatgattataatttgaaatggtttttatttcctattgataataatcagtatattattacaagttatggagtaaataaaaataaggtttggactgctaatggtaataaaataaatgttacaacatattccgcagaaaattcagcacaacaatggcaaataagaaacagttcttctggatatataatagaaaataataatgggaaaattttaacggcaggaacaggccaatcattaggtttattatatttaactgatgaaatacctgaagattctaatcaacaatggaatttaacttcaatacaaacaatttcacttccttcacaaccaataattgatacaacattagtagattaccctaaatattcaacgaccggtagtataaattataatggtacagcacttcaattaatgggatggacactcataccatgtattatggtatacgataaaacgatagcttctacacacactcaaattacaacaaccccttattatattttgaaaaaatatcaacgttgggtacttgcaacaggaagtggtctatctgtacctgcacatgtcaaatcaactttcgaatacgaatggggaacagacacagatcaaaaaaccagtgtaataaatacattaggttttcaaattaatacagatacaaaattaaaagctactgtaccagaagtaggtggaggtacaacagatataagaacacaaatcactgaagaacttaaagtagaatatagtagtgaaaataaagaaatgcgaaaatataaacaaagctttgacgtagacaacttaaattatgatgaagcactaaatgctgtaggatttattgttgaaacttcattcgaattatatcgaatgaatggaaatgtccttataacaagtataaaaactacaaataaagacacctataatacagttacttatccaaatcataaagaagttttattacttcttacaaatcattcttatgaagaagtaacagcactaactggcatttccaaagaaagacttcaaaatcttaaaaacaattggaaaaaaagataa

SEQ ID NO: 297 - DNA, 3727 bp, Bacillus thuringiensis
  source 1..3727: mol_type = genomic DNA
atgaattcatatgaaaataaaaatgaatatgaaatattgaatgattcaaaaaaatctaacatgtcgaacccttatttacggtacccactagcaaatgattcactagcttctatgcaaaatacgaattataaagattggttaaccatgtgtgatagaactgatactgatgttttaagcagcagaggtgcagttagtacgggggtgggtatgctttctacgattttgagcctttttggcattccacttatcggagaaggaattgatttattactaggagcggcagatttcctttggccagaatccgatggcggccatcaatacacctgggaagacttgatgaaccatatagaagagcttatggatgaacgattagaaactgaaaaaagaactactgcacttgacgatttacgtggtctaaaagctcttttaggtctattccgtgacgccttcgattcttgggaaaaaaatcaaaacgacccgatagctaaaaatagggtcggcggctattttgaagatgtgcatacccattttgtgaaagatatggcgtctatattttcagctacaaattatgaagtattactattacctgtctatgcacaagctgcaaatttacatttacttttattaagagagggagttatttacggaagccgatgggggatagctccagcagctgatttctatcatgaccaactattgaagtatacggccatatacgcaaaccactgtgttacttggtataataatggtttagctcaacaaaaagaactgttcgcaaaatcaccaaactggaaccgcttcaatgcatatcgtagagatatgacaattactgtattagatatcattgcattattcccaacttacgacgctcgtttgtatacaaaaccaataaaaacagaacttacaagagaaatctattcagatgtattgaatttagatgtatatggggtacagcagacagatttgaataaaaatgaggccgccttcacacggtccccacatttagttacaagattacgaggttttgatttttacacaagaactaagtatgcatattggagatatttggctggccatacaaattatttttcttttacgggtaatggtactatttattcaagttcatttaataactggtatgatacagatatgaccaagagtacaataaacattccagactatgctaatatttataagttatggacaaaaagttatacgaatatatctccctatacggacccagttggtatctcacaaatgcaattctctctaacaaataatcagcagttaacttatacgggtacgagtgccccaaagtatcctgtacgcgaaacgttctttgaaataccacctacggatgagaagccgctaacttatgaaaattatagtcacattttatcttacatgactagtgctcaacattttggagataaaaaaataggatatacatttgcttggatgcatgaaagtgtagattttgacaatcgtgttgatccagataaaatcacacaaataccggcggtgaaaggggattatcttcaatatggatatgttaagcaaggccccggtcatacaggcggagatcttgtgtctatgattcgtactgatcgtttagggataaatgtttattttcctcaaccactagactatcgtatacgtattcgctattcaacaagtagtaatggttatctatatatttattcacctaatactaaaatagtatatctcccacccacaaccttagtagatggtcaacctacttttgacccgatggacttcagtgcattcagagttgtagaagttccagctagttttcgtgcaagtgttgcgggctatacaaactttactattgaagcagggtttggcccagtatatatagacaaaatcgaatttatcccagataatacaacaactttagaatatgagggaggaagggacctagaaaaaacaaagaacgcggtgaacgatctgtttaccaattaaaacaaatgattaactagagtaggtggtatcgctgttaaaaaaataagcggaaaaggttgtgaatcctatgtttatcagtaatataaaaaatacgctaaaaatagaaacgacagattatgaaatcgatcaagcggccatttctatagaatgtatgtctaatgaacattcttccaaagaagaaatgatgttatgggatgaagtaaaacaggcaaaacaacttagctggtctcgtaatttactctacaatggtgactttgaagatgtatcaaacggatggaaaacaagtaatacgattgagatccgagagaatagtcccgtttttaaaggacattaccttcatatgtttggggcaagagatattgatggaaccctatttccaacttatatctaccaaaaaatagaagaatctaaattaaaaccatatacacgttatcgagtaagaggatttgtgggtagtagtaaagatctaaaattaatggtaacacgttacgggaaagaaattgatgccatgatgaatgttccaaatgatttggcctatatgcagcctaccccttcatgtggagattctcgctgtgaatcatcgtcccggtatgtgagccaagggtatcctacaccagtaacagatggatatgcttctggtaggtatgcatgccagtccaatcgaggtacaaagcatgtgaagtgtcacgatcgtcatccatttgattttcatattgacaccggagaattagatacaaatacaaacgtaggtattgatgtcttatttaaaatttctaatccagatggatatgctacattagggaatctagaagtcattgaagaagggccactaacaggagaagcattaacgcatgtgaaacaaaaggaaaagaaatggaaacaacacatggagaaaaaacgttgggaaacacaacaagcctacgatccagcaaaacaggctgtagatgcattatttacaaacgaacaagagttacactatcatattactttagatcatattcaaaacgctgatcgactgatacaggcgattccctatgtgtaccatgcttggttaccggatgctccaggtatgaactatgatggatatcaagggttaaacgcacgtatcatgcaggcgtacaatttatatgatgcacgaaatgtcataacaaatggtgactttacacagggactaacgggatggcacgcagcagggaaggcaatggtacaacaaatggatggcgcttctgtattagttctatcaaactggagtgcgggggtatctcaaaacttgcatgtccaagagcatcatggatatatgttacgtgtgattgctaaaaaagaaggacctggaaaagggtatgtaacgatgatggattgtaatggcaatcgggaaacactgaagttcacttcttgtgaagaaggatatatgacaaagacagtagaggtattcccagaaagtgatcgtgtacggattgaaataggagaaaccgaaggtacgttttatgtagatagcatcgagttgctttgtatgcaaggatatgctagcaataataacccgcacacgggtaatatgtatgggcaaagttataatggaaattataatcaaaatacgagcgatgtgtatcaccaagggtatacaaacaactataaccaaaactctagtaatatgtataatcaaaattatactcacaatgatgacctgcattccggttgcacatgtaaccaagggcataactctggctgtacatgtagtcaaggatag

SEQ ID NO: 298 - DNA, 930 bp, Bacillus thuringiensis
  source 1..930: mol_type = genomic DNA
atgatttttttggcaattttagatttaaaatctttagtactcaatgcaataaattattggggtcctaaaaataataatggcatacagggtggtgattttggttaccctatatcagaagcacaaatagatacgtctattataacttctactcatcctcgtttaattccacatgatttaacaattcctcaaaatttagaaactatttttactacaactcaagtattaacaaataatacagatttacaacaaagtcaaactgtttcttttgctaaaaaaacaacgacaacaacttcaacttcaactacaaatggttggacagaaggtggggcgatttcagatacattagaagaaaaagtaagtgtatctattccttttattggagagggaggaggaaaaaacagtacaactatagaagctaattttgcacataactctagtactactacttttcaacaggcttcaactgatatagagtggaatatttcacaaccagtattggttcccccagccaaacaagttgtagcaacattagttattatgggaggtaattttactattcctatggatttgatgactactatagattctacagaacattatagtggttatccaatattaacatggatatcgagccccgataatagttataatggtccatttatgagttggtattttgcaaattggcccaatttaccatcggggtttggtcctttaaattcagataatacggtcacttatacaggttctgttgtaagtcaagtatcagctggtgtatatgccactgtacgatttgatcaatatgatatacacaatttagcgacaattgaaaaaacttggtatgcacgacatgcaactcttcataatggaaagaaaatatctataaataatgttactgaaatggcaccaacaagtccaataaaaacaaattaa

SEQ ID NO: 299 - DNA, 750 bp, Bacillus thuringiensis
  source 1..750: mol_type = genomic DNA
atggaaaatttaaatcattgtccattagaagatataaaggtaaatccatggaaaacccctcaatcaacagcaagggttattacattacgtgttgaggatccaaatgaaatcaataatcttctttctattaacgaaattgataatccgaattatatattgcaagcaattatgttagcaaatgcatttcaaaatgcattagttcccacttctacagattttggtgatgccctacgctttagtatggcaaaaggtttagaaatcgcaaacacaattacaccgatgggtgctgtagtgagttatgttgatcaaaatgtaactcaaacgaataaccaagtaagtgtaacgattaataaagtcttagaagtgttaaaaactgtattaggagttgcattaagtggatctgtaatagatcaattaactgcagcagttacaaatacgtttacaaatttaaatactcaaaaaaatgaagcatggattttctggggcaaggaaactgctaatcaaacaaattacacatacaatgtcctgtttgcaatccaaaatgcccaaactggtggcgttatgtattgtgtaccagttggttttgaaattaaagtatcagcagtaaaggaacaagttttatttttcacaattcaagattctgcgagctacaatgttaacatccaatctttgaaatttgcacaaccattagttagctcaagtcagtatccaattgcagatcttactagcgctattaatggaaccctctaa

SEQ ID NO: 300 - DNA, 792 bp, Bacillus thuringiensis
  source 1..792: mol_type = genomic DNA
atgcaccttaataatttgaataattttaataatttagaaaacaatggtgaatatcactgttcaggacctattattaaaaaaccgtttaggcatattgcattaacagttccatccagtgatataactaattttaatgaaattttttatgtagagccacaatacattgctcaagcaattcgtttaacaaatacatttcaaggagctatagatccacttaccttaaatttcaattttgaaaaagctttacaaattgcaaatggtcttcctaatgcaggagttacaggaactattaatcaaagtgtaattcatcaaacaattgaagtttcagttatgattagtcaaattaaagaaattattagaagtgtgctagggctcgttatcaatagtgctaatttttggaacagcgtagtatctgctattacaaatacatttacaaatttagaacctcaagtagatgaaaattggattgtttggcgtaatttatcagctactcaaacaagttatttttataaaattttattttctattcaaaatgaagatacaggtagatttatggcaatattgcctatagcatttgaaattactgtggatgttcaaaaacaacaattattattcattacaataaaagatagtgcacgatatgaagttaaaatgaaagctcttactgtagttcaagctttagattcttataatgcacccattatagatgtatttaatgttcgtaactatagcttacatcgtccaaatcataatattcttcaaaatctgaatgttaatccaataaaatcgtaa

SEQ ID NO: 301 - DNA, 7305 bp, Diabrotica virgifera
  source 1..7305: mol_type = genomic DNA
acaactgacacataacgtcagtagttgtctattttcactggtgactaatttttgagaattagtaattggtttcgtatttttttcttaacaaaagggcaaaatgagcttttttggaaaattgttcggggggaaaaaggaagagatagcccctagtcctggggaggctattcaaaaactcagagagactgaagaaatgttaataaaaaaacaggattttttagaaaagaagatagaagaatttaccatggtagcaaagaaaaatgcgtcgaaaaataaaagagttgcactccaagccctcaaaaagaagaaacgattggaaaagacccaactacaaatagatggaacccttacaactattgaaatgcagagggaagccctcgaaggagctagcacaaatactgctgtattagattctatgaaaaatgctgcagatgcccttaagaaagctcataagaatttgaatgtagatgatgttcacgatatcatggatgacatagccgaacaacacgacatagccaacgaaatcacaaacgctattagcaatcctgtcggattcaccgacgatctggatgacgatgaattagaaaaagaattagaagagctcgaacaagaaggattggaagaagacctgctccaagtgccaggtccaactcaactgccggctgtgcctgctgatgcagttgctactaaaccaatcaaaccagcagctaaaaaagttgaagatgatgacgatatgaaagaattggaagcctgggcctcgtaaaattcctgaaatctggatatttgtaaacgaaatcacccatctaagatgaaaacattataaatatataggtaataacagctaaaaacgtttcaatgtagaacaagcttttgctgaaaaggcgtcttgcaaaaaatgttgataatttagaattctctatatattatatatttgccctttaaggaaagatttcttttatagtcatagttcaaccaaacgtttcataaattagaatacaggggtgtcagaattctacgtgaatttattgaaaaaaaagaactttccttaaagttggcataatgatatttttgaaattatgtaaataggtatatgtatgctcttactaacggttttaatattgggtttagaagcaccttaattttatttttatacaaggtagtaacattttttcattgtaatttgttaaaaaatattgtataacgcaaaaaatggtgtgataaagcaaaatattattgagtgcttattttcttattttattaaaagatcttatttacgttaaatctaaatatattgggtatctcagaatatgttaacaaaggtttcttgtatcaacagaaaaatacaaacttattcattattgtggttcatttgattatgcttgtgtatatttaatctgccataaacaagttttgataaatgtcactgctctgtactttttgtttttctgactgtagtttctgtcgtttgtaattccttggtctcggccatcgcccatacacacatagggaatgttgtataaaagaaatgatagtagactagcaatggcccgaacagcaagaattaaataattaaaatatggaaagactgaatactaagctgagattggtcaaagcccttatttttcctattgctatatacgcagctgaaacatggactctcaaaaaaatcaatcgaagtaagatcgaagccttcgaaatgtaggtctacagaattattgtacccgtgtcctggagagaacacagaaccaacctgtcaattctgaaagagcttcatataaaagacaaggtattaaaaaaagtataccgaccatacttaaattactttggtaaagtaacgattactatacgaagaggcaaatcgttactttgattactctgattacttcgtaccaatcgtatcagagcgagtaacgactattgtatctactttgattacttcgtatcagagcgaataacgactattgtatctactttgattactctgattacttcgtaccaatcgtatcagagcgagtaacaactattgtatctactttgattattctgattacttcgtaccaatcgtatcagagcgagtaacaactattgtcagggccgcgtttaggtcaaatgacgccctaggcaattctctagtagccgcccttcaaacatgtaccatttttgcgaaaaaaaatgcaagcagaattttttatttaaataagaatgttattgcacaaatctcggtgttcttcaaataatgtttagaaatgtgttaaaaatattctttattttacatcaggcgtaatgttacatattactattataagtatgtttgagcgtttggaactgtgtccaatgcatgcgttttaatgcatgatacgtagaaattgcctgtttgtagccgcacctacttgttcgattttaaatgagagatgcattgaaaacattactcaagcactatgtgtttatagctttgtttaacaataaaaaaattaatttttagcaatgcaaataatcaaaaccggtataatttgacatgcactttcaaatgcggtaagcagaattgctattttattttttaatcaaaagttattcggattcaaaaattgcaatttttcgatattttgaaagttcaaccgcgtctatctcgaaaactatgcatcctacgaaaaaactttaacaacattttttgcttagaatgacccaaaaaaaatagaaaaaaggtttgttttgctaagaatcactgttatgtaattcctcaagttctttgtttataataaccttatccggaaaaaattagactgttttaataaatatctagacaaattgcatatttgtaatgtacacaaaagtacatacaaattaaaagttctaaaaaaataaattttgtaattttatgtcaactatcttaattgagtgcaaaaaatgcaagaaatcgcgttgattgcactaaattgttaataattaaaaacagacgcgaactctaggcaggaaacaagtaggttttcatcctataggtcaacagtcaacaataactaaaaacgtagtcatctacctcaatatttcagtggcccgaacatggtctattttttgcttatttccctggagtaggtatatcagtgtgacgacactaaccttatctacttgtaataatacagtttgaaaatcccaaccctaactcgatgtcctactgtcgacaagtcaaatctttagtttttgcaaaatgtgcaatattgaagtgttcaatggcccaccgcatttgcccagctgccggcggcctaataatcactaaatttatgacttccatcctttttaaatgaatagtgttaagataacagaatgctatgtttgatttatttttgttatgaatgcagtttgttttattctatttagaaatgaatgccaacttctatttcattgatggatgaacatacagacttgttattcgattttaatttttatatacaaatatttttttgtacagtatttttgccgccctctcacaatttgccgccctaggcaactgcctatattgcctaatggatacagcagccctgactattgtatctacaacctgtacacttaaatactttctaccaatcgtatcccagcgagtaacggacgagacacgtattttacgagtgttatcgaatatcgttatcggtttgaaacgttttaagggtgtgagggtgaggagaagatagaagatgaaacagagggagatataatgtataggtaaaatatttaatgtatgtcgctaacaaagatcgaatgcgagaaccctatatttttatctcgatctatatctatacctatacaaaatacctacctactgagaaatacgattctcgatatgattaccggtactcaaatacaaaagtcatcatagtaatcaaagtaacgaatactgtaaatgattactttatacaaaagtaacgatttgtaacgaatactcgacagtaactataatcaacatcactaatagtcggaagaacgtggactatataattattaatattagaaggaaatgccgaagaccaagaagaagatctcgaacacgatggacagaccaaattaagactctggtgggaaaatcacaatatgaaagcgtccatctggcacaggatcgcagccattggatacagcaagctaacaatatttagagtatcaccacgccccgacaaaggctcaaggaatgaggaggagagggttttcatattgaaactaattgtaaaggtgcgtcaagatatgctccgaatgccgtatcgaacctcctcgcgaacttaaatgtggacggcaccctgcaacaacgtactgaacctcgtcgcgatcagggtgcaacatcgaactgttccactagtttccggtaaatccatccacatcaaagtaaagggtcgtcgaaaggttcagaacgaggtttgccgtaaattcacatgtggactagtttgcgaagcattcggcgtttcggtcattgttattttgaaattgagtgcatcaacatggaatgaatggatgagaattgtactactaatagaaaattatcgagaaaacgaaatattatgggaaccaaagagtcccagatattataacaaaataaaaaaataatgcataagtatataagctgatgcagcaacgtccatcttgcagtaaaggtgttaaggcaattactgatggaacatcaaaatgttcggttcgttgcttatttcaagaccccttgcgacaacgtcgcgaacctctgttgatcgcttcgatgttcgcgacgaggttcgatacggcatggcattcggagcatgtgtggacgcacccttagtacaacgagttttatttctgtagaagttttttgacagtttacaaacggtgcgctctatgcttgtatgaaaattaacttttttcttatggttgtatggttatcaaatactattgactgtaaaacatccaactcccacaaaaatctggaagcacgttgccactagcgccactgtcggcttgagttgaactacgttttgacaacgtaaaatttgacgtaaacattcaaatttaattttataaatttttgaataacgagctaattttgctaaattaaattaaaataaaaatagttcaaacacttatacaaaaacaattataaagccattttataaatgtaaggttagattgctctggttatcctactcataccgctagatggcgctatttttttgcttcctcaaagttaatgggaaatgtcaagagttgtgtgtattacagtctatagtatttggtgatagtacggactatgtcataattataatttatgaggccaatcctcgccaatgaagaagtacttcgctgaatgaccggcaaaaggcgttaaaattctgtaaaatgtacaactgacaattatagttcagcgcaaatttaagtacatgcagcatagctgcatgctgcatgattcgcgaggttagtgtgtagagatccagacagcagctgtagattaaaagaaattattatcatgatgcgataggatgcgatggaaaagcttatgggtaaactatgagttaacaaaaatcctcaaatcgatacaagggtttgcaaaagatagttgtaatacgatctaagcaaatcgtacaatagggatgtagtatagtattaatacagtacgaaagtatttattttatattcggtttaaaatttactaaaaataaaataaaatgtcgcgttttagggttttctattatagaaactaccgtttctcaaatatcaataaattttattcaacggtcttccaatgactccatcccgttttctttggtgttcgtctgaaagtgttgcaaatgtctctgttatagccgcaatggcttcttgtttggacgacaagcactgataagaaaaactgacttaaattttaaaaaacagatgaaattctaagagaatcaaacctggaatttagatgggtcttccattacttcatagtgtagatcctcctaatccaagatattttgtggacagtttcattgtcctggcagaaaaggattagtgatcatctcatgatcttgaccttgtagaaaactctatattgttgaattccgatgaaagatgtgcgatatctgagcgattccaagagcttatcagactaccttagtaaatcatgtacagtaagcgccaccctactagatacatgggtaggtacctaattgctatgtttatgtgctagtccggtccgttctcaaatgtgactttcatccctgtcatgttactgtcaagaaactattcaaaataattgtttttccgtacaaaaaatacattaattaatagtattagtactctgctttaaaataactttattcaaacaccaagaatattacaatactttaaaacttttacaaaacaaaatgacaactataaacgtcaaaattagatcagctgatctattatttgtcaacttcatatgttaatattgtccttttcatgatcatttttcagtgcgtaacaaatgataggagaaagggtaagtccgtgataatacacatttatgacatttattctaacatgacattttagttaaatctgacagttgtcacattttattttcaatttggaataaaaacaaagcaaatgtgtttcttgcatttataaaatggtattttctttgatttgtatagtgtatagtcttataaattatacagattatatttgtaatattattatctaattaaaaaaaattatttttttattatggcgccatctatcgacaactaaaataactagaagaaatgttataaaaatgtcaccgacgaaatgtaatcaccgacgtgcttttttttctgtctcatacaagttaatgtgttagaaagaaatcgaaaaactgtgacgcactgaaagatgatcatgagaaataatttattcagtttctatacattttctgacgttctaaacgtcactagacataaataaacaagtgaagggtccaggactgtaatagctctatgttcctatgtatctagtagggtggcgcgcactgtataattggattattattcaatttgtctactgtaacgtctcggttcttaatacaactcctggctttttttatttattttttgtatttttttttcagggaaccttttttatctagttatttttttataataatagtaaaccatgatttttatttttttcccaattgagtgcatagataaaagcgcgtttgcatatatgggacacccagtattaaaaaatatgcattacatttttctttacttggaccttgtgtacctgtaacctacattcaccaaattgtgttttgtattctaattttaaatacagtaatatattttgattcactta

SEQ ID NO: 302 - DNA, 1093 bp, Leptinotarsa decemlineata
  source 1..1093: mol_type = genomic DNA
cattattgggttggcgacactgtgaatgactaatagtagttggtctatcagccataatttgttgcttgtttagtgcaaatatgagttttttcggtaaattattcggtggcaagaaagaagatgaaggggcctcgcctgcagaggcaatacaaaaacttagagatactgaggaaatgctcattaaaaagcaagactttctggaaaagaagattgaagaatatactctaatagcaaagaaaaatgcatcaaaaaacaaaagagtggccctgcaagccctcaagaaaaagaagcgattagaaaaaaatcagttgcaaatagatggcactttaactactattgaacttcaacgagaagctctggagggagctagtacgaacaccacagtattggaatctatgaaaaatgcagctgaagctcttaagaaagcccataaaaacttggacgtggacaatgtgcatgacatcatggatgacattgctgagcaacatgatattgcgaacgaaatctctaatgccatcagcaacccagttggattctcagatgacttggacgatgctgagttggagaaagaactagaagaacttgaacaagaaggtctggaggaagatttactcaaggttcctggaccgacggaattgccagctgtcccaactggcgccattgccaagccagtcaaaccagctaaaaaagtggaggaagatgacgatatgaaagaactcgaagcttgggcctcataaaatgttcatggttgctaggtttgttgaaattttataaaaatatgtaggcacccatctaacccaagagattcaaagttattaatatatcactgaagtggagttgaatatcttgtttattggtggtgtaaataagaacccaactcttgatttctcctccgaaggcttgggatgcttctccataatgtatatatatcttttattttgtttacaaaggacaactagcagggtcctcaaaagattaaaactccatttgttaggaattatatatttttagcataattgcagtaatttcagagttgcctagatgcaagcttttggtaattcaaatttttctttaataataaagtatatttaca

SEQ ID NO: 303 - DNA, 488 bp, Leptinotarsa decemlineata
  source 1..488: mol_type = genomic DNA
atggtcggtatgggacaaaaggactcatacgtaggagatgaagcccaaagcaaaagaggtatcctcaccctgaaataccccatcgaacacggtatcatcaccaactgggatgacatggaaaagatctggcaccacaccttctacaacgaactccgtgtcgctccagaagaacacccagtccttctcactgaagctccactcaaccccaaagccaacagggagaagatgacccaaatcatgtttgagaccttcaacacacccgccatgtatgtagccatccaagctgtactctccttgtacgcttctggtcgtaccaccggtatcgtcttggactctggagatggtgtcacccacaccgtaccaatctacgaaggttacgctcttccccacgccatcctccgtttggacttggctggacgtgacttgaccgactacctcatgaaaatcctcaccgagaggggttactcattcaccaccacagctgaaag

SEQ ID NO: 304 - DNA, 2472 bp, Leptinotarsa decemlineata
  source 1..2472: mol_type = genomic DNA
gtcagctgactgtcttgtgacaaatttacttgcttggttaaaagttgatagtccgtcgtcttgcgagttgtgaattgactgggtgaggttgaaagtgatacaagtctacattcataatgtcgagattaattgctgatgaggaacaggaatcacagtatggatatgtccatgctgtatctggaccagtcgttacggccgagaaaatgtcaggatcagctatgtacgaattggttcgagtaggatactatgagttagtaggcgaaattatccgtctggaaggtgatatggccaccattcaggtatatgaagaaacttctggagtaacggtgggagatcctgtgttgcgtaccggtaaacctctatctgtggaacttgggccaggtattatgggttccatctttgatggtatccaacgtccgctgaaagacatctgcgacatgacggaaagtatctacattcccaagggtgtgaatgtgccttcactctccagaactatcaaatgggaattcaacccaatcaacatcaagttgggatcccacttgacaggtggagatatttatggtatggtccacgaaaacacccttgttaagcacaaaatgatcctcccaccaaaatctaagggaacagttacatacgtggcagaaccaggaaactatactgttgatgaagttgtattggaaactgagtttgatggagaaaggtctaaatacactatgttacaagtctggccagttcgacaggcaagacctgttagtgaaaaactcccagctaatcacccgcttctcacaggacagcgtgtattggactctcttttcccatgtgtgcaaggaggaaccactgctattcccggtgctttcggttgtggtaaaactgtaatttcccagtcactttccaagtattccaactctgatgtcattgtgtatgtaggttgtggagagagaggtaatgagatgtctgaagtattgagagatttccctgaactgactgtggaaattggtggtgagaccgaatctatcatgaaacgtaccgccttggttgcaaacacctccaacatgcctgtcgctgcccgtgaggcttctatttatactggtattaccctgtctgaatatttccgtgatatgggttacaacgtttccatgatggctgactctacatcacgttgggctgaagctttgagagaaatttcaggacgtttggctgaaatgcctgctgattctggttacccagcctacttgggtgctcgtcttgcctctttctatgaacgtgctggtcgcgtcaaatgtttgggtaaccctgacagagaaggatcggtttctatcgtaggagcagtatctccacccggtggtgacttctcagatcccgttacttcagcaactttaggtatcgtacaagtgttctggggtttggataaaaaacttgcccagcgtaaacatttcccatctattaactggctcatttcttattcgaaatacatgagggctctggacgatttttatgacaagaacttcccagaattcgtatcactcagaaccaaagtcaaggaaattctccaggaagaagaggacctctcagaaattgtgcaactggttggtaaagcctctttagccgaagcagacaaaatcacccttgaaatcgccaaactgttgaaagaagacttcctccaacaaaactcctactcctcctacgacagattctgcccgttctacaaaacggtaggcatgctcaagaacatgatcggactgtacgacatgtcgagacacgctgtagaaacgaccgcccaatctgaaaacaaaataacctggaacgtaatcagagactccatgagcaacatcctctatcagctcagcagtatgaagttcaaggaccccgtcaaagacggagaagccaaaattaaagcagacttcgaccagctctatgaagacatccaacaggccttcagaaacttggaggattaagtgggggtcgcgtaggactgtgcagcttggggttttaggtttcgaagatgtttctctggaactgcacttggtcactatcagaaggcctctgtccctcactctgggtattgtcaaccagcggaagtagtaataatggggttttcccttttgatattatcatgtataataataaatcatgtaaatttttcgagtatgtgtatagtttttgagatttcttggtgagggtaagtgttgaaaactataatttttcccatcattccagttacttttaagtttgattttttttttcattgaaataggtgcttatcagttgtccagtattatcgatttcattgaactgtggccattttcgaaatcatttacacattttaaagctgttgtacattatatttacctttttaaagatatatcttactattgtacagtttaccatgtatccaatgtctagaggtttagaacttttgattgtagtgctattgttctgttttgaacgataataaacatacatactgttgtt

SEQ ID NO: 305 - DNA, 1686 bp, Plutella xylostella
  source 1..1686: mol_type = genomic DNA
atggcagcagtagcagcagcccagaagaaccgcgagatgttcgccatcaagaagtcctacagcatcgagaacgggtacccgtctcgtcgccgttcgctggtggacgacgctcgcttcgagaccctggtagtcaagcagaccaagcaaagcgttttggaggaggcccgtgcccgcgccaatgactctggcttggattccgaacttatccaagacgatgtcctgattggcaccggcgctgtcactccaactgttgaggtgggcactcagcaggacgacactaaagatggtcaactcgccgatgcggaggtcggtggaatagacggaaatgcagatgacgattacaccttgaccgaggaggaggtgatcttgcagaactccgccagcgagtccccggaggccgagcaggcgctgcaacaagcggctttgcttctgcgcctgcgcgacggcatgggctcgctcgcgcgcatcctcaagaccatcgacaactacaagggctgcgttcaacacctcgagacccgcccctccaacgccaacgacatccagttcgatgctctcatcaaagtgagcatgtctcgcggcaacctgctccaactcatccgatctctccgccagtccaccgccttcgccggcgtcgacctcatctccgacaacgtctccagcaagaccccgtggttccctcgccacgcttccgacctcgacaactgcaaccacctgatgaccaagtacgagcccgagctcgacatgaaccaccccggcttcgcggacaaggagtaccgcgcgcgcaggaagaccatcgccgagatcgccttcggctacaagtacggcgacccgatcccgcatatcgtgtacacggagaccgagaacaacacgtggtcgcgcgtgttcaacacggtgctggacctgatgcccaagcacgcgtgccgcgagtacaaggcggcgttcagcaagctgcagggggacgacatcttcgtgcctcaccgcatcccgcagctggaggaagtgagcaacttcctgcgcaagcacacgggcttcacgctgcgcccggccgccggcctgctcacggcgcgcgacttcctcgcctcgctcgccttccgcgtgttccagtccacgcagtacgtgcgccacaacaactcgcccttccacacccccgagcctgactgcatccacgaactcctcggccacatccctctgttggccgacgccagcttcgcccagttctctcaggagatcggtctcgcttctttgggagcctctgacgctgaaatcgaaaaactgtctaccgtgtactggtttacggtggagtttggtctctgcaaggagaaccagcaactgaaggcttacggcgccgctctcctgtcttccatcggggagctccttcacgcgctgagtgacaagcccgagctgaggtccttcgagcccgcgtccacctccgtgcagccctaccaggaccaggagtaccagcccatttactacgtcgctgagagcttcgaagatgccaaagacaaattcagacgctgggtgtcaaccatgtctcggccgttcgaggtgcgcttcaacccgcacacagagcgtgtggaagtgctggactccgtggagcagctcgagaccctcatctcccagctcaacaccgagatgctccacctcaccaacgccgtcaagaagctcaagggctcccacttcgagtga

SEQ ID NO: 306 - DNA, 1044 bp, Diuraphis noxia
  source 1..1044: mol_type = genomic DNA
cagaagattgttcaaacacatatatcgtcgtttcgttctggataccgattattcacaacatgggaagttacaaattatacctggccgtcatagcaatagcttgcatagctgcagtacaggaagctagttgctctgatgagcaggtacagtacgatgatgrggaagaagtgatcggattagagaaagagcaggaagaagtgtccgaaccagatatggaggaaaaagaagagccagaatcagagatggagtaccatcagtgcgaggaatacaaatcgaagatttgggacaatgcatttagtaataaggatgctatggacatgatgaaactgacgtttataacagctgagaaaatgggctccgacgccgtgtgcactgacacagcccgggccttcataaacttcatcgaagtgatggccaccaacagtaactcccaatacacgagaagtatgttcaaaaagttggtggcgtttattgttagagagttgaacacgacgtcggacaatttcagagagacgtcggaggtgttcgaacgtatctggacaactccagagattcgtgactttatcagggactcagtcactcggaccaataacgtgctcaaggagccccgtatgagaagccgactgttcaaagtgattgaagcagctatggatctgatgtcgaaatccaaagacggagaatcaatgaaacagaagtttaaggggatgtacagagctcccaccaagatggcaaggagtgccatggataaggttggaaatttctttcgaaaactttaataagaatgtccatacagactagtgatatatatatatatatatatatatatagcatatacatatagataaacataaagtgcagattttctaaaaaaaaatgttaacctaaaatctcacttccccgcctctctgagagtcgtcttcagtgttttgtacagtatcattacacattcggtatatctaacataccacacaccgcgttgttcttgcaataaatattgttattgttattattttattttgttctaaataaactcaattgattaac

SEQ ID NO: 307 - DNA, 3085 bp, Acyrthosiphon pisum
  source 1..3085: mol_type = genomic DNA
tgaacctgcaataatcgccgccaccgacgcgacgtacagaccggtccgtgcagtgtcccttagttgtacttgtgcgctttttgtgtgtcggtcacgtgcggatttcgcacaaacgttttgattttttcacatcgtatatctgttattgtctccacgcaataattattgcactcgccgcagtgttgcatccattcagtagaaacaatattggcacctattttatagaggctcgcgccgttcgtatttatagttattataaatatagtgcccgaacgacttcgggctcgtccgactttcgtggattttatatcattaatttttttatcgtcgtcgaaatgctgttaatcttgaatagtgatccgttgtcgtatccgtcaccgatccatgtgtcgacgatttaaatctagaagaaattcgtccaccacggtgtccaagacctcacactcactatttaccagccggctcgacctacaaatgacttattgttgatcgatcatcagagaaaactcgcacgcttaaacaaaaaatgtttttggaaaacgaacaccagccaattattagccattcaccgtacgacctagcacgtccacttgaacaccatcaccatcatcacctcaaccatcacgccgcgtccaatcatcttcagtcgagcaccgaccacttgcaagaagattcggaaggccggagtacggctagctcgccgacgtccagttaccgcgacctgtccgggtgcgaagactttgatctgaaaatcccgaaaccgtctggtcacgggtctggcactggtggaaataacaacaacaataaccacaataacaacaacaacaaggaacaaaaaccgaaaaagcacaagtgcaaacactgtgggctggagtgcacagaaaaggtgcagtactggaagcacattcgcactcacataaaacctgaacagttgctggagtgcccaaactgtgagttcgccaccgacctgaaacaccactacgaataccacctgctgaaccacacgggtgccaagccgttcacgtgcccggactgcgactacaagtgcgtgagcaagtcgatgctccaatcacacctcaagtcgcattcgaacgtgttccagttccagtgttacgactgtggttacgcatctaagtacatgcacagcctcaagcagcacctgaagaagcgcgaccaccggccggccacgccgctcaacccagacggcacgccgaacccggacatcgtcatcgacgtggtgggcaaccgacgcgggccgcggcagaacaagaaacaaaaccggcacaacccgtatcagcaacagcaccagcagcaacagctccagcagtctatgacggtgtgttcgtcgcaggacgacggcggcagcagtagcggcggccacccatcaccgtactcgatgcaacagctgttgcagatgcctgcttccggatgcgcccaagttacgtatccgacctcggccgagtcgtttatgtattcgatgatcactaaacgctccatggagatggttgattaccaggccgccgaatacatggccatcaagaacaacaacaataataacaactcctcgtcggtcgatgataagatggaagtgcaacagcaccaccaacaatcactacaacaccaccacaacaatcatcaccataaacgcggccatcagtaccattcagatgacgtgctgaaagtggaattggctgggcgtagcggtagtggcggtgaactgacgcccgaaccacatgtacctgtgttggcggtcgccgatccttcgcccccgaccgtcgttttggccatcgagacgggaccgttgaacttaagcagagactcagtggctcctcgcgccgcgggcagcagccggcgtaaggggatcgcgtgcaaactcgagcgaccggcaaccgaatcgcagcctaagtcggtgtcggtgccggtggtggttgttccggtgtcgcctgcagtaccgatggattgcagtagcgagtcaagaggaatggtggaggagactttgattccggtaaaggaagaatatcaacagtaccaccactaccatcagcagcagcagcagcagcagcagacgtcgtcattgtcttcgacgcctgaaaaagaagacaaggaagacgagacgcatgtgtgccaccactgtgacataatattcaaggagaacatcatgtactcgatgcacatgggtttccacagcttcagggacccgttcgcgtgcaacctgtgtggcgagataacggcagataagttttcgtttttcgctcacatagcgcgcgtgccgcacagttaggctgcaattagaagacgcacctacgaaagatacgaaataataatagagtacaaattttaaaacaattaaccctttaggtatgtaatataggatttatcgtaagaaaaaattaaaacagattaagaatataaagtaatgttacataggtactatattatacatctctttctttttaataactgtcccccccaaacctaagagtgtagttacgccgcacccatgcttcgtacaaatgaaaatcgtttttggcgcttagctaaaaacgattttaatttgtatacctacgcggccggtgttgttgaacggttccggttcttaaacgttgatttcaacttatcaacgtgtaagagtcggcaccgtgtcttcaaatcgtgattgcgcacattaatcgtcgagatgcttagttgtttatcgttttaaatatttttttctcgttatatttttctcggaaataaaattttaattatgttttaattttattttcgaggaataaaagccatcgccaattttagcgatttaaaaatgtttaactcgtgtcctcatagttaagcacaaattattagtttatttgttacatgtaaattttattatccttaaaaataacttttttaactttccaattacccaagattgaatcaataatgacaaatattgattttttttacgtttaaataccgtaatacctcatcttcttcattattttttattgtttgatctagtcgttaaactatttctcctcgtatactatagtttagtatcgtgtatacctatgcacttatgatagatactattaaaaataaaaaa

SEQ ID NO: 308 - DNA, 2383 bp, Botrytis cinerea
  source 1..2383: mol_type = genomic DNA
atgtcctataatcgattagatccggcgggccaaggccaagacgattattacaatatgaataatagacatcaatcgccgcaccctcaagggtaccaactagaagatgcgccatatggcagaccaaatactacttcacccggtcctggaatgcacaatctagagatacctatgggtcctggggcacatagaattggaacgccgagtgatcaattgcaagctcaaccatcttattcggtcgaacatttagatcaaaatcaataccatcagcgcatgtccctcaatcccagtcaaagctacgactcggaatattctttagatcctaacgcgcatcacgatgcttactaccaacctccataccaaccctctcctcatgaagaacaccctctacagaactatgccccagggcaagacccctacgcttacaatgatgatgatgaccatcaaccaattctacaatcgcatgaaccttatgggccagatccgcactcagctagtggcactgattacaaaggtggttatgacgggacggtacaatctccatcagcgacacctgtacctgcgttgagaagatacaagacggtcaaggaagtccaactgttcaatggaaatctcgtactcgattgtccgattcctcccaagcttttaaatcaagtcaatcatgcaccaccgccggagagagatgagttcacacatatgagatattcagccgcaacatgcgaccccagtgagttttttgaggagcgctttacattgcgacaaaaactctttgcaaagcctcgacacacagaactcttcatcgttgtcacaatgtataatgaagatgatgtattgtttgctagaacaatgcacggagtattcaagaacattgaatttatgtgcactcgtaaagacagtaaaacatggggcaaggatgcttggaagaagatcgtagtgtgtgtggtcagtgatggacgtgctaaaatcaatccaagaacaagggctgttttggctggtttgggggtttatcaggacggaattgcgaagcaacaagtcaatggcaaggacgtgacagcacatatctatgaatatacgactcaagtcggaatttctttgaaaaaggatattgttacactcacaccaaaacagcaacccgttcaattgcttttctgtttgaaggaaaagaatcagaaaaagatcaactctcacagatggttcttccaagcctttggtagagtacttgatcccaacatttgtgtactcctcgatgctggtacaaaaccaggaaaggactcaatttatcatctatggaaagctttcgatttggaaccacattgtgcaggagcttgtggtgagatcaaagctatgttgggcccaggaggaaagaatttggtcaatccattggttgctacccagaatttcgagtacaagatgagtaatattctggacaaacctcttgaatcggcatttgggttcatttcggtgttgccaggtgctttttctgcatatcgatatgtcgctttacaaaacgataaaactggaaatggaccactggagaagtactttgcaggagagaaaatgcatggagcaaacgcgggtatttttactgccaacatgtaccttgccgaagatcgtattttgtgtttcgaactggtatcaaagagaaattgtcactggatcttacaatacgtcaagtctgctactggagaaaccgatgtaccagatacaatggcggaacttattttgcaacgtcgaagatggcttaacggaagtttcttcgctgctatctatgctcttgctcatttctatcaaattttccgaagtgatcacagctttttacgaaaaatcatgtttttgattgaattcacatatcaaactattaacatgatcttcgcttggttcgctcttggtaatttcttcttggtttttcacatcttgactacatctctcggaagttctgacttactgggtaacgttggtgtaattcttggtgttgttttcgaatggctttacttgtttacgcttttgacctgttttattctggcgctgggaaatcgacctcaaggaacgaacaaagtttatatgtctatggtttatttctggatcattatcatgatatacctaatgtttgcttcgattttcatcacagttaaatcaatccaaactcaacttgctaaagacgaattcaactggacggatattatcaagaatcagatcttctatactctgatcatttctctcgcctcaacttatctactctggttcatttcttcctttttattcttcgacccatggcacatgtttacatctttccttcaataccttcttctcactccacatatatcaatattctcaacgtttacgcttttctgtaacactcacgatattacatggggcacgaagggaa

SEQ ID NO: 309 - DNA, 2736 bp, Botrytis cinerea
  source 1..2736: mol_type = genomic DNA
atggcgtactctggaaacggaggctatgatgagcataagctccaagaccttccacctggagggggcaactaccatcaccctcaagatgaagaggaaggagctttacctttactcgattctggaggacatggcggcccattcaacagcccttacgactctcactcccaaggaggccttcgagcgaatactcctccagtcagacctgtttctgcctacagtcttacagaaacgtatgcgaacgatccacaaccatacagcagcgattacaactcatcccacacatacaatgagcagttagaagataacccatacccacaaaccgacactcctttgtcaagagccgggactacctccacagaggcatggagacaacgacaagcccctcaggctggaggtctcaaacgttatgctacaagaaaggttaagcttgtccagggaagcgtcttgagtgtcgatcatccagtacccagtgctatcaaaaatgcaattcagcaaaaatacagaaatgatttggagggtggcagcgaggaattcacacatatgcgttacaccgctgcaacttgcgatcccgatgaatttactctgaaaaatggttacaatctacgacctgccatgtacaatcgtcatactgagttgctcattgccgttacctattacaacgaagacaagcagttgactgcacgtactcttcacggtgtcatgcaaaacatccgtgatattgtcaacctcaagaaatctgatttctggaatgtcggcggaccagcatggcaaaaaattgttgtctgccttgtttttgatggtatcgatccttgcgacaaagacacactcgatgttcttgctacaattggtatctaccaagatggtgtcatgaagaaagatgttgatggaaaggagactgttgctcacgttttcgagtacacaacacaactttcggttactgccagtcaacaacttatccgcccaaccgagggtgatgccaactgtcttcctccggtgcaaatgatgttttgcttgaaggcaaagaacacaaagaagattaattcccatagatggctgttcaatgcatttggtcgtctccttaaccccgaagtttgcatccttttggatgccggtacgaagccaggacctaaatcgttgttgtctttgtgggaaggtttctacaacgacaaagatctaggaggtgcttgtggagagattcacgctatgttaggaaagggaggcaaaaagcttctgaacccgcttgttgcaggtcaaaacttcgagtataagatcagtaacattcttgacaagcctctagagagttctttcggatatgtcagtgtgttgccgggagctttctctgcataccgattccgagctattatgggacggcctcttgaacaatacttccacggagatcacactttgtccaagattcttggaaagaagggtatcgagggaatgaacattttcaagaagaacatgttcttggccgaggacagaattctctgtttcgagcttgtagccaaggctggtagcaagtggcatttgacttatatcaaggcagctaaaggagaaactgatgtacctgaaggagctgctgaattcattggtcaacgtagaagatggcttaacggttcctttgcagcaggaatgtattccatcatgcatttcggcagaatgtacaagagtggtcacaatattgtccgcatgttcttcttgcacattcaattcttatacaacgtcttctccaactttctcagttggttcatgttatcttctttctggctcactactactgttattatggatcttgtcggtacccctactgctgcttcggacactactgcccttcaccatggctggcctttcggtgatactgctacccccatcatcaacacgattctgaaatatctctacttgggattcctactcgttcaattcattctggctcttggtaatcggcctaagggatccaaggctacttatattgtctcctttgtcgtttttggtgttatcaatctctacgtccttgttctatccatgtatctggtcgttcgtgctttctcgtcaggagatagtctcgatactagtagtgcgaaagatttctttgagagtttcttcggagatagttcgagttccggagctggtatcattattcttgctttagctgctacatttggattgtacttcgttgcatccttcatgtatatggatccatggcacatgttccattctttcggaccgtacttgttgctcatgtcatcttacatcaacattctcatggtgtacgctttcagtaattggcacgatgtttcttggggtaccaagggatctgataaagcagaagctcttccgtcagctaaaactacgaaggttgatggtaaagcagcagtcattgaagaaatcgacagaccgcaagaggatattgatagtcagtttgaggcaactgtcaagcgtgctcttagtccatttgttcctgaagttgaagatgagagtaagaccttggaagattcttacaaatctttcagaaccaagcttttgatctcttgggtattctcaaacgcgttgttggctgttgctatcactagtgacagtgttgatggatttggtttcggaaatactgcatcaataagaactgctaagtttttcgaaattttgctttactcaacggctttcttggcacttattcgattcctcggatgttcttacttcttgttcaagtctggtatcatgtgctgcttcatgagacgttaa

SEQ ID NO: 310 - DNA, 2715 bp, Botrytis cinerea
  source 1..2715: mol_type = genomic DNA
atggaaacatcaaggagctggaatagttcggctgaaaactatcctatgaatgaacttattcaacattcaaacaattctgttactgatcctgctacacagttagataacactgatcatattagtgatgtacatcactcaaatgatgctcatgatgttggtgaaagtttgctatcagatactagtggctaccatccaacaacaccctatgtgactggtactgggcaggtacaacgtcaacgttcaccaaccagctcagtgaacggtgaggaatttttcggggatcaacaccatcttccagatatcgaccaggacttctacagaagccccgaagactcctttaatgcgcaagacatgccgtccgcgaacggtgctcgtggagctcttcggcgccgcgctactcgaaagattaaactgattcaaggcggtcagggatctgtcttgagcgcaaactaccctgtaccaagtgcaatcaagaatgcattacagccccagtacagagatatagagaatggtaccagcgagttctcagagatgcgatacaccgcggtaacttgcgacccgaatgattttaccttgatgaacggttatacactacgccagcacatatacaaccggcacaccgagcttttgattgcaatcacctactataatgaggacaaggtgctattcgctagaaccttgcatggtgtgatgaagaacattcgcgatattgtgaatctgaagaagtccaggttttggacgcagggttccgcagcatgggagaaaattgtcgtctgcctagtgttcgacggtttcgaaaaggcggatccaggtgtgctcgatctcctcacaaccgttggagtatatcaagacggcgtgcgaaaacaggatgtggatggaaaggagacgacagcccatgtcttcgagttcacgacacagttatccatcactcccgacctacagctttctcgtcccaattcggatgtggatgattccagtaacttgcctccagtacagctcctcttctgtctcaaacaaaagaataccaaaaaaatcaactcgcatcgttggttgttcaatgcctttggacggattctcaacccggaagtcaccattttgatcgacgcgggaacaaaacctggacctcgctctttattggccttatgggaggcattctataacgacaagaaccttggtggcgcatgtggtgagatccacgctatgcttgggagccggaactccaagttactaaatccgcttgtggcaatacagaatttcgaatacaagatttcgaatgttcttgacaaaccccttgagagctccttcggctacgtcactgttctccccggcgcattttcagcatatcgctttcgagcgatcatgggccgtcccttggagcaatattctcacggcgaccatacgttgttgtctggcaagaaaagtatcaacaacatgaatatttttaaggagaatatgttccttgcagaagatcgtatcctttgtttcgagctagtagtgaaagaaggacagaattggcacttgtcttatgtcaaagctgccaagggcgagacagacgtaccggaaggccctgctgagtttctcagccaacgccgccgttggctgaatggatcatttgcggcctcgctatactcgcttattcacttcggtcgcatgtacaaatccgggcacagtctgctccggatgataatgtttcatttccagctgctatacaacattgccaatgttatttttagttggttctctttatcatcctattggctcactaccactgtcatcatggatcttgtcggtacacctgtaactgcatcgaactatcacggctggccgtttggcgatactgcgtcccccatattcaaccacgttattgaatatatttaccttgcgtttgtgatcacacaattcattctggcccttggaaatcggccaaagggatcgcaagtgacctatctggtgttgttcgtggtgtttggatttattcagctctacatcatcattctgtcattctatctggtttaccgggcactacggactcccattggggaacagatcgacacgtcttcggccgcagcattctttgagagcatgtttggaggaacgggagtcgccggcgtgattttactagccttggtcaccatttacggcttgaactatgttgcctcgttcctctacttggatccttggcatatgtttcactccttcccgcagtatatcattctcgcttcgacatatattaacattttgatggtgtatgccttcaataactggcatgatgtttcttggggcacaaagggctcagatgaaagcgaaaagctcccttcggccaatgtgatcaaagactcgaaatccggtgtcgagatggtcgaagaagaggagatgcaacaaacagatattgaccagaagtttcaggagaccgtgctaagaactctggcccctgtcgaagtggaagttaccgtagaaaccaaggaggtcgatgacacgtataagtcgtttaggacccgcttggttgtctgctggatcctgtcgaatatgctgctggtcgggattgtcacctcggatgatttcgcatttcttggcgttggtcctctacgacccggaccgccatactacttcaaatttcttctatatgccactgctttcttgtcgattatcagattcttagggtttctttggtttctcggacgaacaaacattatgtactgctttgcgaagaggtaa

SEQ ID NO: 311 - DNA, 4648 bp, Botrytis cinerea
  source 1..4648: mol_type = genomic DNA
aaaccttccttccgagccaggatatcgagctttcgacgtcttctactacctcctcacatctgcatcgactcctgccgaacgagaattcttgagcttaaagcaagcttctagttacgcgcttctagaaaagtctggaacatatggccctccaccgtaccttcctactgcggatgatgctgctgctgcagacgacttcagagcatcattaaaagctattggtatcaagggtgccgcacacagagatctcatctcaatattagcaggattactaaagctaggtgataccttgagctttgttcttgatggggatgcgttggaggaaatttgtgaggatgttggaggtctgcttggtttggaacccgatgttctcgtcaagcaatgcacaacccaagagcgagaaactttgatcggtggtctctatgaagcccttgtagattgggtaattctgaaggccaacgaagccattgctagtgagatgctcaggatcaaggacggtgattcttccagtgaagggggaccaggagctcgaaccccaaatacagaagacgacaatggtgatactgtctgcataactgttcttgagattccagacccaaatcctgggaaagcggctgcagtgcgaggtgtctttgacgatactcagggtattaattccgaaatgaaagaagatggtgtggatgtagtttctgctggctcaacggttatccgagagatgcaaaatgctgtatccgaagttgctccagatctcggtatcatgactggaccttctgggagagatcgtgaacacgagcttgagaagcgtgagatcgtattagagaaggttgcccgcgagggagaagatgatggtttcctcaagaagcttctgctcccaatcgagggtcaaggtattaacctaggccgcaacggtcgtattgacctaccttccgttcttggtagcagtcgcgtctggtatcacttatctatgcatccgaccgacgattcacccgcagctctcgcttcgcttccttcaacaacttcggcttggtccgcgggtgctatctcacgccaactccgcgcctggcgtttgccagagtgggcaaatcgacgaaacaaaaacttggattttacagccgatttcgatttcgaagaatttgttcaacgatatgccccccttggttgtaaggatggccgtgatggcattgaaagctgggtcatggagcgtggttggagcaatggtgaagttgtcataggcaaagagcgaatatggatccgcgaaagtgcttggtgggaagctgaaaccatgcttgacctaaagccggccgaaggggagttccaaagtatgggcggtcctggaggcatggcaggcatgctaggagcccacgacatgaacacaggatactcctccaacccaccaaatggaagtggtttctttgccggtcccaataatgatctgacgcctcttgggagtcacgataatatgatgaatcgacaaagtcaagtcaacgtggcccggagtaacctcggggctcccaccatcgcaccatcaagaaatatcagtggtggtgactatggactcggcttcaagggagataatacgaggggccaggtttattacactgatgagaatggagaaatggtggatgatcccgaaggtggcaccccgaaagctgtcgtcagcgaggcagcaacaaaccagcgtcgtatctgggccgccattacctgggctttcacgtggtggattccttcattcctcctctcatttattggtcggatgaaacgaccggatgtacgcatggcttggagagaaaagctagtgttgtgtttctttatcctcttcatcaatgccttggttattttctggattattgaatttggtaaactcctctgtccaaattccgataaagcgtggaatgcaaaagaagtcgctactcatcaaggagataacgatttttgggtcagcattcatggaaaagtatacgatctttccaagttttggaagttgcagcacagtgataccactgtcgagacaacctctgatgttatgcaaccatttgctggtttgaacttggacagttacttcccgccaccattgactgttgcatgccctggccttgtaaccgattacaccgtggttttactggacaatagtactgttgaatatccttccggggtccatacatctggcaacctttcagcatatacaaccagtaaactttacgactggaattggtatgcggacgtgtacacacctgcaatcaaagagtattaccatggtgatctagtggtcaagaatagtgcgatcaagagtgaaggccaaaatgaaaatcattattgggttatatcacgagtgatggatgacaattacaaaacagccaacgcatcttatcaagtggatatcctcaacaacttgaattgcatgaacaatttgttctatgcaggcatccctgattttcgagattctattagatgtcagatcaacaactacatccttctcgctttcacaattattgtgtgtgctgtcattgtcgtcaagttcgtgtctgcacttcaatttggttcgaagcgtcgtccaactcctcaagacaagttcgtcatttgccaagttccagcatacaccgaaggtgaagactcattgcgtaaagctttggactctgttaccgctctacaatacgacaataaaaggaagctcatctgtgtcgtttgtgatggcatggttgtaggaggtggtaatgatcgccctacaccaaagattatcctcgatattctcggtgtagatcccaagatcgaccctccagccttaccgtttaaatccgtcggagatggcaacgagcaactcaactatggtaaggtatactcaggtctatacgaatttgaaggaaatgtggtaccatatattgtagtggtcaaggttggcaaggaatccgagcaatccaaatcgaagcccggtaatcgtggaaaacgtgacactcaaattattctcatgagtttcctcaatcgcgtccatcacagagcacccatgaacccattggagttggaaatgttccatcaaatcaacaacattattggcgtagatccagaactttacgaatatctactgatgattgatgccgataccagtgtaagggaagactcgctgaatcgtctcgttgctgcctgtgtcaatgacggtaaaatcgctggtatttgtggcgaaaccaatcttgaaaacgaagagcaatcttggtggactatgattcaagtttacgaatatttcatctcgcatcatttggccaaggcctttgaatctctattcgggagtgtcacttgtttacctggttgttccactatgtatcgtctacgtaccgctgacaaaggcaaaccattgattatcgctgatgccatcattgacgagtacagtgagtgtgttgttgatactttacacaagaagaatcttctgtctcttggagaggatcgattcttgactacgttgatgaccaagcacttcccatacatgaagtacaagtttattccagatgcatacgctagtactgccgcacccgaaacctggagtgttcttctttctcagagaagacgttggatcaattccaccattcacaatctagctgagttggtccgacttcctgaactgtgtggattctgttgtttcagtatgagattcgtcgtcttcatcgatctgttcggtacaattattcttcctgcaactacagtctatctaggatatctgatctacaaagtcgcaacgcatcaaggtcaattccctctcatttcgatttgtatgattgctggtacatacggtttacaagctttgatatttattctcaaacgtcaatggcaacacattggatggatgattatttatatccttgcattcccaatttactctttcattttgccaatctactcattctggaatcaggataacttctcgtggggtaacacacgtattgtcctgggagaaaagggagctgcaaaggttgtggccgtggacggcgctgaatttgacccaagaagcattcctcttcagcgatgggacgattacgcctcacacaacaaccttccaggacgtcgtggagtaccagtcgaaaaggcatacgatacattcgatgatcaatacgaaatggatgacatgaaatccatgtactcatctgtcaagccagcctccactattttaactggtttccctggtcgcggtccatacatgcctcctcaatctacttactccgcaaaccaatacactgaccaccctgtccgcaatcattctgcaatgtcccttcgccaacaagatcgttccgcctcaccatatcaagactaccctggcaacaatcgtccttcgatgcaaatgatgtcttcggataatcttctcggtggtggtccaggacgacatcaatcacgctcgtcggtaggcttcacaggtggtgctcgttcaccattagcaggagctggtattgatagacctgctagtggatttgatttccaaaggggtaccgccggtccagatgatttgcagattgtagaggctattcaaaactgcttgagggaggtagatctagataatgttacgaagaaacaggttagagctttggtagagcagaggttgcagacagagttggttggtgagaggaggacatttttggacaggagtattgattctgagttggctgctatgtaa

SEQ ID NO: 312 - DNA, 259 bp, Botrytis cinerea
  source 1..259: mol_type = genomic DNA
catttcggaggcggtcgaaactcgccggtttcatgcgtgcctctcacttcttcagtgaagctcgaaggaaccacgcttgaccaagttaatatgttcaccctatgtctatttcaggatgtgttcagcaaagcttacaaatcgaatcctgatagtatgccgtactttttggttcctatcaattgtccaaatcacactggggactggaaagattatgagcccatgtcaataattgattgggaaactgttcaatatgtccaag

SEQ ID NO: 313 - DNA, 200 bp, Botrytis fragariae
  source 1..200: mol_type = genomic DNA
gcatggcaagaggcagaacataatcctggaattgttcgtacatctattatgagcctcgatgatttaaagattgagctctgccttccgatcgagccaccaccaattccgcccttgacacttcactggaattccagcacagagctgtctgtcgagtttacaaacgatgccgaaataggaaccaccgaggacatgatattacg

SEQ ID NO: 314 - DNA, 210 bp, Botrytis cinerea
  source 1..210: mol_type = genomic DNA
agaagcagattgttattttggccatctcaccatcatcgcagatggatatgcctccaaattccgcaagcaatacatcaacaaaactcccattgtcaaaagtaaattctacgctctagaattaatagattgtcccatgccagctcccaatcatggaatcgtagtcctctcggacgtctccccagttctcctctatcaaatcggtacccacga

SEQ ID NO: 315 - DNA, 254 bp, Botrytis cinerea
  source 1..254: mol_type = genomic DNA
gcgaagttgatggagcaaaagaagttcatgaaaattggcttgtctacagaagctttccgatcctacgtcccaatcatacaaatggaggtggaaaactttatgaagcgttcttcggcgttcaaaggtccaaagggaactgctgacattggtcccgctatggctgaaatcaccatctacactgcttcgcacactctgcaaggaaaggaagtccgcgatcgattcgatacctcctttgcctctctctaccacgacct

SEQ ID NO: 316 - DNA, 209 bp, Botrytis cinerea
  source 1..209: mol_type = genomic DNA
ttcaacgctgtcaactgggtagaatcatctgcatgggatggaagagacgccattgtcgttgctggagatattgctctatatgccaagggtgctgcacgtccaactggaggtgctggagctgttgccatgttgattggaccaaatgctccagttgttgtcgagcctggtcttcgcggatcctacatgcaacatgcctacgatttctacaa

SEQ ID NO: 317 - DNA, 186 bp, Botrytis cinerea
  source 1..186: mol_type = genomic DNA
gtctggctaagcctagtcaattgaatgcgttcattcgttatagttcacagcagactgaaagtcatgatacgttaacagagacaactcgaaatattggcatcatagctcatatcgatgcaggcaaaactacaactactgagcgtatgctctattacagtggctatactcgacgcataggagacgttg

SEQ ID NO: 318 - DNA, 1610 bp, Fusarium oxysporum
  source 1..1610: mol_type = genomic DNA
atgggttttaatccgcaaggccaaggcaacggcccaaactatgatgcgccacgggaaatgcaagatttaccagctggccaagcttaccactttcgcgaatctgacgaaacagccgccgctcgtgtttctcctgtgagcaatccttacgaaccagactatgatcaattgtcccctccccctccgctgggcgcacaacgacccgtgcccgagcagaatgagtcgagccgcgatcttctacacagttcataccaaggcagcgtaggccataacagctttgacggccatagttttggtcacaatagctatggacctggtgcttttgggcattatcctgctgaccagcacggtcgcatgcctgggtctccgggctacgaatacccagagcctgagtacgatgtcgaagcttcgcgtttggcagaatctcgtctctccgtcatgcatcgcgcccctacgatgcaagattggggtcagaatggcgaggctctgtctgttccagactttgcccacggacgccccgactcaacgtaccaggagttcgatgtcgacgagagctggatgatgcgacagcagcagaaccaactcgcaggtggtctcggtcgctcaaagacccgtaaagtcaagctcgttcagggctccgttctcagcatcgattaccccgtgcccagcgccatcaaaaacgccgttgaaccgcgataccgaagcggtcccggaagcatggaggaggagttcacaaagatgcgctacacagctgctacatgcgaccccaacgatttcaccctgcgaaacggctttaacctccgccccaagatgtacaaccgtcatacagaactgctcatcgccatcacctattacaacgaggacaaggtgctacttgcgcgtaccctccacggaacgatgcagaacattcgggacattgtgaacctcaaacgctccaagttctggaacaagggcggtcctgcgtggcagaagatcgtcgtttgtctcgtctttgatggtatcgacaaggtcgacaagaacgttttcgacgtgctcgcgacggttggtatctatcaagatggtgttctcaaaaaggatgtcaatggcaaagaaaccgtcgcccatattttcgagtacaccagccaagtctccgtgacacccgatcaacagctcgtccgtcccgatcccgacaagcctcatcgcaatctcccccccgtccagtttatcttctgtctcaagcagaagaacagcaagaagatcaattcgcatcgctggctcttcaatgcctttggccgcattcttaacccggaggtcgccatcctcattgatgccggaacgaagccggccccccgcgccctgctgtccctctgggagggcttctacaacgatcgtgatctcggcggcgcctgtggagagatccatgtcatgcttggcaagggtggaaagatgcttctcaatccactcgtcgcggtgcagaatttcgagtataagatctccaacgtcctcgataaaccgctcgaaagtgcctttggatatgttagtgttttgcctggtgctttctcggcgtatcgcttccgcgctatcatgggtagacctctggagcagtactttcacggcgaccatacgctctccaa

SEQ ID NO: 319 - DNA, 4677 bp, Fusarium graminearum
  source 1..4677: mol_type = genomic DNA
atggcgagacgaatgtccatgtattcgatggcctccgaggctatgggcggtcctcaagctccccagcagatgtctaccacgactctcctgaatgccatccacaacatctacctgtcttctcaaccttatcagatcgatgccggtactagtctggttgtcaacacatggctcacagctgctcaggctggtgctactgttgatgctaccctcgctgctcgagcctgggagcatgctaggcgtcgtgctgaagatggatgtgttgttttaggttcactccaccaggcaactccctcgcttctcgtgccgttcctgaacactttcccgttcgccattcccgcatccatttacaagtcattggaggctgtacaaccgtttctccgatgtgtcactccatacaacgcttcggcccctcgacagatcgcactcggcgttacactgacattgagtttgggaggaagtgtcacaggagcctctctggccttgtctcaaggtggaatcgatactgagaatggattgctcaacgttcctgccgaggctggataccgtgcttttgacgttttctactatttgctcacatccgcctcgacacccgcggagcgagagtttctaggcctcaaggcgccttcagcgtatgctctccttgctcgctcgggtacttacgagcctccttcttacctcatcaccgccgatgatggtgccgctgccgacgactttcgccaggcactcaaggagattggtatcaagggatctgtccaccgtaacttcatctctaccttggctggacttctcaagcttggcaacactctcgactacgatgccgattccgacgatttcgaggagatctgcgaagatgtcagcggtcttcttggtatggagcccgaggttctcatgcaacagttgagcactgaggatcgacgaacacttgttgctggcttgtatgaggctctcgttgactgggtcatttccaaggccaacgctgccattgccgctcagatgctccgtatccgagatggcgatgagtctgttgatggtcgtggcgtccgcactccaaacgaaaacgaggatggtgacaccgtttccatcactgttgttgaagtccccgaacccgctctcggcagggctttggccatgcgaaccattttcgacgacactttgggcattaacgctgagatgattgaggatggtgtcgagatccaccctgcttcatcttctgttgttcgggagatgcagcaggccgttgccgatgtcgcgcccgatctgggcattatgactggtccccagggccgagaccgccagcatgatattgagaagcgagaagtcattttagagaaggctgcctacgcttctgaggaagacagcttcctgaagaagttgttgttccctgttgagggtcaaggcatcaacttgggccgaactggtcgtttcgatctaccaggtctcctgagctctagccgtgcctggtttcatctcgctctgcatcccacagacgattctcctgctaacttggctacccttcctgctatcacctctgcgtggtcagctggtaccatttcccgacagctccgttcttggcgtcttcctgaatgggccaaccgtcgtaacagaagtctcgactacacagctgattttgatgtagacgagttcgttggtcgttacggcgcactaggctgtaaggatggcaaggacggtatcgagacttggatgctcgagagaggctggagcaacggcgaagtctttattggcaaggagcgaatctgggtccgcgagggtccttggtgggaggcagagagcatgctcgacatcaagcctgctcacagtcttcaaagcataggtcaaaatccgttcacatccggttttgacacaagctactcagccaacccacccaatggcagcggcttcttccctgctcccgctatggacaacagcatgaatggcagcaatgaccagctcatgcatacccgtaatttcagccagggcaacatgagccaagccactttcaaccaacaccctcacttgaaccctcaatcagcaccttcgattgccccatctgctatgcgcaatgctcagcccgctaccggtgactacggtctcggtaacaagggcgacacctacaagggacaggtattctataacgatgatggagacttcactggtaagcttgatggagaccttgccaaggacaagaagatcgaaaccaagcccctgacctttggccgacgagcttgggttgcttttgtttgggccttgactttctggattccttcacctcttctcaagtttgttggacgcatgcgacgacctgatgtccgtatggcttggcgtgaaaagctcgtcttgttcttcattatcctccttcttaacggcttgattatcttttggattatcggtttcggaaagcttttgtgtcccaacgccaacaaggcatggaacgttaaggaggttgctggccatgcagaagatgaggatgctttctgggttgctatttttggcaaggtttacgatatcaccgacttctggcgacaacagcacagtgataccagcattaagaccaccaagacgaacatgttgcccctcgctggtatggttatggataactacttcatgcctcccctgaacagagcttgcagaggcctcggcatcaaggagactgttcaactcaccttcaacgagactataacgaaccctcttgcacagcatgtttctggtttctacactcgcgaccgtaccagtgctcttcacaacgctgactggttctggacgactttccagcccaagatcaaggaatactaccatggtgatctcgtttggaaagaaggcaccgttaagagccagggctcaggtagcgagcagcatccatgggtcatgtacggtaatcagatctacgatcttacggattatctgcacaccctagatgtcaacgacaacttcgatacctacaagttcttgaacgaggacatggtcaacttatggaagaacagccccggtaccaacatcaagaaggatcttgaccttctcatttccaacgcaaagaatgagactgtggccgccaaccttaagaacagttggcagtgcattcaaaacattgcgtacaagggtatcgtcgatttccgtgactcaccccgctgccgtgtcaacaactggctccttttggccttcgccattatcatctgtatcgtcaccgctgtcaagttccttgctgctctacagtttggttccaagcgacgtccttcgccccaggataagtttgtcatctgccaggtgcccgtctacactgagggtgaagattctcttcgaaaggcattggactcgttgacggctcttcagtacgacaacaagcgcaaacttatctgtgtcatctgtgatggtgtcgtcgtcggtgaaggcaacgatcgtcctacacccaagattgttctcgacattctcggtgttgatcccaaggttgatcctcctgcgcttcccttcaagtctgttggcaacagtgccgagcagctcaactacggtaaagtttactctggtctgtacgagtttgagggcaacgttgttccatatatcgttgtcgtcaaggttggcaaggagtctgaacagaccaagtctaagcctggtaaccgtggaaaacgtgactctcagattctccttatgagcttcctgaaccgtgtccatcatcgcgctcccatgtctcctctcgagcttgagatgttccatcaggtcaacaacattattggtgtggaccccgaattgtacgagtaccttcttatgattgatgccgatacctgcgttgaggaagacgccttgaaccgtcttgttgccgcctgtgcccacgacgcaaagattgctggtatttgtggtgaaaccgccctggagaacgatgaaaagacttggtggacaatgatccaagtttacgagtacttcatttctcatcatcttgccaaggcctttgagtctctcttcggcagtctaactcgtcccagtttcaccatgtaccgtcttcgaagtgttgacaagggcaagcccctgattatctctgatggtgtcattaaggattacagtgtttgcgacgtcgacaccctccacaagaagaaccttctgtctcttggtgaggatcgttatctcaccaccctgatgaccaagtacttccccgagatgtcctacaagtttatccctgatgctcagtgtaagactgctgcccctgaatcttggagtgttttgttgtctcaacgtcgacgatggatcaactcgaccatccacaacctggttgaacttatgcaactcaaggagctctgtggtttctgctgtttcagtatgcgcttcgttgtgtttattgatcttaccggtaccatcattctcccttcaaccaccgtctacattggttacctcatctacgtcttggctaccggcactggacccattccgtacatttctcttgctatgattggtgccgtttacggtcatcaggctctcatctttattctcaagagacagtggcaacacatcggatggatgattatctacatccttgctttccctatctactccttcattcttcccctctactccttctggaaccaggacaacttctcgtggggtaacactcgtatcgtcattggagagaagggtgacaagcaggtcgttgctgttgacgatgagggcttcgatcctcagtttgctggcgaaaggtag

SEQ ID NO: 320 - DNA, 6546 bp, Fusarium graminearum
  source 1..6546: mol_type = genomic DNA
gaactcaaaccaccaaaaaccaaccctcgcctctcccctttgctactctttgcattacgcattgccgacactcgttttacggcttcgtcaaatcactccgtctcgcccttttttgcgaccgagactacacaagccggtgaatcactttctcgtgattgattcgtctttttgaacttgaatcgacgccaaattacatctttttcgttggcctttcggaccagagtcacctctccctaagccatttgacgtttttgacgacaacatcttgcagtgccggtcacgcttgttcttccgcctgatcttgaatcacatcacgctcgttgatcatccacatgtgtatctctagataatctaataactcaacatgtcgggatatccgggcggtggtcaacgcgaccactatgacgatggctacggccaccctcagggaggcaaccaacagcaaggtggaaacacggattcctactatcaagacgatcaatactatgatcaaggctatgacaaccgcggccacaataataataacccgaataacaacagcaacaacaacaacgagggctactatgacgaatctggttattacaacgccgaccctaacaacccttatcaacatgacggaggctactacgacggccacgaccagtatcaagatggctattatgacaatggccagggtggatactacgaccaggactatgatcgtgggcaccaaggacagggtgcccgtcaaggctctgaggaagattccgaaacgttcagcgacttcaccatgaggtcggacatggctcgcgctgccgagatggattactacggccgcggggatgaacgttacaacagctacaatgacgggcagcgtggttatcgacctccctcctcccaaatctcttacggtgggaatcgctcgtctggcgcatcaaccccgaactatggtatggactatggcaatgctctacctcctggccagcgttcccgggaaccttatcctgcctggacttccgatgcacagattccgttgtcgaaggaggagatcgaggacatctttcttgacctttgttccaaatttggtttccagcgagacagcatgcggaacgtgtacgaccatctgatgatccttctcgactcccgagcctctcgaatgacgcccaaccaggctcttttatcccttcacgctgactacattggcggcgataacgctaattaccgcaagtggtacttcgccgctcatcttgaccttgacgatgccgtcggatttgccaacggtcttggaaagggtaggaagaagaagggtagcaagaagaagaagaaagacccagaggccagtgaagccgagactttacaggatctcgaaggtgacgaaagcctcgaggctgctgagtatcgttggaagacacgcatgaacaagatgtcccagcatgatcgaatccgacaaattgctctgtaccttctctgctggggcgaagccaaccaggttcgcttcatgccagagtgcttgtgttttatcttcaagtgtgccgatgattatctcaattcccctgcatgccaggctctcgttgagccggttgaggagttcaccttccttaacaatgtcatcacccctctctaccaatacttgagagatcaaggttacgaaatctctgatggtgtatacgttcgacgtgagcgtgaccacaagaacatcattggctatgacgattgtaaccagcttttttggtaccctgagggaatcgatcgcatcgtcctgcacgacaagagcaagcttgtggatgtgccaccagccgagagatatgtgaagctcaaggacgtgaactggaagaagtgcttcttcaagacttaccgcgagtcccgttcctggttccatcttctggttaattttaaccgcatctggatcattcatttgaccatgttctggttctacacctctcacaatgccccaagtatcctggttggtccaaaatacgaacagcagcttaaccaacagccctcaacagccaagtcattctctatcgtagggttcggtggtgctattgcttctcttattcaggttcttgccactctcgccgaatgggcctatgtgcctcgtcgatgggccggtgcccagcatcttaccaagaagctctttttcctgttgtttatcctggtactcaacatcgctcctggtattaaggtcttctttcttgagggtattggtggaaagaagatcgacactgccattggtatcgtccatttcgttatcgcattgattacgttcttattcttttccgttatgccacttggaggcctttttggcagttaccttgctaccaacaacaggaagtatgttgccagccaaaccttcactgctagctggcccacgctccgtggtaacgatatggcaatgtcctatggactctgggctgtcgtctttggcgtcaagatgggtgtttcatacatctacttgattctgtccttccgtgaccccattagatatctaagcatcatgaaggtcaactcttgccagggagacgctcttctttttggaaatcagctatgcagatggcatccaacaattgttctggcactgatggcattcactgacgttatcttcttcttcctggatacatacctttggtacgtccttctcaacaccgtcttctcggttgcccgatcattctacatcggatcttccatcttgacaccttggagaaacgtcttttcccgtcttcccaagcgtgtgtactccaagatcctcgccaccaccgacatggagatcaaatacaaacccaaggttctcatttctcaagtttggaacgccatcgtcatctccatgtatcgggagcatctcctcgctatcgagcatgtccagaagctattgtaccaccaggttccttccgagcaggagggcaagcgaactctgagggccccgaccttcttcatctcgcaggaagatcattctttcaagaccgaatatttccctgcttacagtgaagccgagcgtcgaatctcattctttgcccaatctctgtccacacctatcccggagcctttgcctgtcgacaacatgcccacgttcactgtcatgattcctcactacggcgagaagattcttctgtctcttcgtgaaatcattcgagaagatgaaccatactcacgagttacacttttggaatacctgaagcagcttcatcctcatgagtgggattgctttgtcaaggataccaagattctggcagatgagacctctcaattcaatggagaaaacgacaaggacgagaagaacactgccaagagtaagatcgatgatttgcctttctactgcatcggttttaagtcttctgcgcccgagtacaccctgcgcacccgtatctgggcatctcttcgtttccagactctctatcgtactatctctggcttcatgaactacagccgtgccatcaagcttctgtaccgcgttgaaaaccccgaggttgtccaaatgtttggtggtaatactgataagcttgagcgagagcttgagcgtatggcccgtcgtaaattcaagattgtggtttccatgcagagattctccaagttcaagaaggaagagatggaaaacgccgaattcttgcttcgcgcttatcccgacctacagattgcttatcttgacgaagagcccccagttgcggagggcgaagaacctcgtctgtactccgttctcatcgatggtcactctgaggtcatggagaacggcatgcgacgtcccaagttccgtgttcagctctctggtaaccccattctcggtgacggcaagtctgacaaccagaaccactctatcatcttctaccgtggtgaatacattcagctcatcgatgccaaccaagacaactatctagaggagtgtctcaagatccgaagtgtcctcgctgagttcgaggagatgaagaccgacaatgtctccccttatacccctggtgtcaagaacaatgtctcctcgcctgtcgctattctgggtgcccgtgagtacattttctccgagaacattggtattctaggtgatattgctgctggaaaggaacagacattcggtacactattcgctcgaactatggcacagattggtggcaagcttcattatggtcatcccgatttcctcaacggtatctttatgacgactcgaggtggtgtttcaaaggctcagaagggtcttcacttgaacgaagatatttacgctggtatgaccgctctcctccgtggaggacgtatcaagcaatgtgaatacttccaatgtggaaagggtcgtgatttgggtttcggctccgttctcaactttacaaccaagattggtactggtatgggtgaacaatttctgtctcgcgagtactattaccttggcactcagcttcctctggatcgcttcttgtccttctactacgcccatcctggtttccacttgaacaacatgtttatcatgttctcggtacagatgttcatgattaccatggtcaacctgggagccctccgtcatgagactgtggcctgcgagtacaaccgaaacgttcccatcaccgatcctctctaccccagcgggtgtgccaacactgatgcgcttacggattggatttaccgatgtatcgtgtcgattcttttcgttctgttcctctctttcattccccttattgtccaggaactttctgaacgtggcatttggcgtgctttcattcgattgatgaaacagttttgctcgttgtcgctcatgttcgaagtcttcgtctgtcagatctacgcgaactctgtacagcagaacatttcgttcggtggtgcgcgatatattggtacaggtcgtggtttcgccacggcgcgcattccctttggtgtcttatactctcgattcgctggaccagctatttacttcggcgctcgtttgctcttgatgcttctgttcgcgaccctcactgtctggaagggtgtcttgatttacttctggattacccttcttgcgctgacaatttcgcccttcctgtacaatccccatcaattcgcttggaccgactttttcatcgattaccgagattaccttcgttggttgtcgcgtggtaattcccgcagccacgcttcatcttggatctcgtactgtcgtctttctcgaactcgtcttacaggttacaaacgcaagacacttggagacccgtctgccaaagcatcagctgatgtccctcgagcccctttcgcaaacatctttttcagtgagattttctcgccattgatgcttgctgttgtaacgattctgccgtatctttttgtcaacgctcaaaccggtgttactaagcagagcaatccaaacttcagaggcaagatccaaccgacgcaatcgctaatgcgtctactcatcatcgcttttgcgcctgttgccgtcaatgcaggtgtcttggctgctatgttcggcatggcttgctgtatgggacctctcctcagtatgtgttgcaagaagtttggcagtgttctcgcagctattgcccatgccacagctgtgatcttccttcttatttccttcctgggcatgttcattctggagagctttaacttcacccgcactgtagcgggtatgatcgccgtggtctcgattcagcgcttctttgtgaagcttattgtttcgacctgtctcactcgtgagttcaagggcgacgcgtctaacatcgccttctggagcggaaagtggtactcgatgggatggcacacaatctctcagcctgctcgtgagttcctttgcaagatcaccgaactttccatgttctctgccgatttcgttcttggccactggcttctcttctttatggcgcccgtcatcttggtccccaagattgatactcttcactctatgatgctgttttggcttcgtcccagtcgccaaattcgaccccctatatactcgatgaaacagtccaagcttagaagaagacgtgtcatccgctatgccatcctctacttcaccctcctggtcgtattcatcgctctcgttgctggacctgctgtagttggtaaactcatgggcgaatcactcagcaagaccatcgaaaagatggttcctatgcagggtcttgtgcagcccaactatcttcacaacaacaacactaacagcaccttggcaactggtatcaagaaccctagttacaccggcgctggtctcacaatgactggcagcaagcgcgtccaggcctcggctactggcaagatcaagctgttttgagcgaaaaaagactgggagacagggtctgtctttttggacatttctcggacacagtcgtcgctctctgttcctatgcacagaagaaagttatcaaaatatgaagtttttgctttttcgtttttgcttttgcttttcagttcagtacctagcacaggtggatgcgtatgtacacattttgcattttatttagaagcggaagggtggtgagaggtggaaaggaggtcagcaacacaagccagacctgacctgacctggcattcactggttgaactgaagtggtctttttttgttggcacaaggcgcacctttttaacttattctaatgtgtacaatgaaaggaagcaaca

SEQ ID NO: 321 - DNA, 3504 bp, Fusarium graminearum
  source 1..3504: mol_type = genomic DNA
atgaacgacgatgacgcgattcacaacatccacaagaagatagagcgggaaaaggccctcatcaacgctgccaattctatgagggcacagacaaacaatgaagccgttagatcccgtctcgactcccagatgcgcgatggccgccgcaacctccagtttttcgaggagaagcttagggatattcagctgcgccgtgtgaaccaaggtgttggagacatgtctctcgggggacctgctgacgatgccggtggccctcccgcaccacctcctaaggatgcctccagcaatcccgcgggagatagaggttcctacggctctggttcgggacagtacagccaggctggcggtggttccgacttaatgccccctcgtcatccttatgcaccgggacctggtggatcgggtattcctaaggcacgccccaactttaccaagttagacttaatcaaatatgatacgccacacctgggccctcgtattcaactcatgttgtcccagatccagttcaagctcaatgtcgaggagcagtacctgaagggtattgagaagatggttcagctttatagcatggaaggtgatcggaagagcaaagccgacgcagccgctaggaaggttgaaagcaagcagaagattctactgttgaagcaggcactcaagagatatgaagaactgcatatcgacgcggacgttgcggatgcacaagatggtaagttggcgttgaatgacgtcgaatgtgaagctgacaaagagttagatgattcaatcaacgcccccaacctcaggaagcccctcagtggacaactctcgattcgaatgatagcaatcaaagatgttgaccatgctgcgactggacggttcacgagaggtcccgagacctttattgccgtgaaggttgaggataccgtcatggctcgtacgaaagcgtccaggaacgatcgatgggaggctgagttccatactatcgaagtcgacaaggccaacgaaatcgagttgactgtctacgacaaacctggcgaacaccccatgcccataggcatgctctgggttcgcatttccgacattgttgaggaaattcgtcgcaagaggattgaggccgaaatgaacagctctggctgggtgtctgccgacagaatgggcagcaccagtgctgcccctacacagttcccgatgagtccttcttcaggctcttttggaccaggtgctcaatcgactggtggtgaccaaggggatgatactggcccattcggagctgctggtccccagcctcaggtgcaaactggacctatcgaggaatggttcaatctcgagccaactggacagatccaacttcagttgacatttaacaagtccaacaacaacagccgccctgccgaccttggtcttggtcgaaagggtgccgttcgtcaacgaaaggaagaagtccacgagatgtacggacacaagttcgtgcagcatcagttttacaatatcatgcgctgtgcgctttgcggagatttccttaagtactcagcaggcatgcagtgtgaggattgcaagtatacctgtcatacgaagtgttattctagcgtcgttacaaagtgcatcagtaagagtaacgctgagactgatcccgacgaggaaaagatcaaccaccgcattccgcacagattcaacccttattccaacatgacagcaaactggtgttgtcactgtggttacatcttgccttttggaaagaagaactgcagaaagtgctcagaatgtggtcttactgcccacgcccagtgtgttcatcttgtccccgatttctgcggcatgtcaatggccgtcgccaaccagattctggacggcataaggactcagaagcaaagacaagccaaggtttcttcactttcagaaaagacacttcgacatggcaagactagcccgacaagcaccagctcgccggctccctcatactccagcacgactgctccttcttaccagtcaggaccagtctccccggaggctacagaggccgctaagatgatgtactcgaacccttccacgccgagacctgccggccctgatcgaacttcatccagctcccaagctgcggctgcagcatctgcggctatgtctggaggacctggtgcggcccaacggcagaactcagactttgggcgatatagcggcggttacgatcaaccgcaagaagacccctatgctcaaggaggtcaatacggcgcgggccagcagcgtaagtacaacccggccgattatgcgaacgtgaaccctggctacggaggaccacagcctgctgctcaggctcagcgacctgtacagcagcagccagcccaacaacctcctcctcagtcaccgctacctccagtaccgcaacaccaacaacagcagccacaggctgcctaccaacagcccgcagtgccggcgcatagccctcagcaaccagaacccatgtctcctaagcagcagtcagcggctggtggtaagtctgctcccttggctactgaccctggaactggccagcgtatcggacttgatcatttcaacttcctggctgtgttgggcaagggtaacttcggtaaagttatgttggccgaaaccaagcgctctcgaaagctctatgccatcaaggttctcaagaaggagttcatcatcgagaatgatgaagtcgagagtatccgttctgagaagcgtgtgttcttggttgccaaccggggcagacacccattcttgaccaacttgcatgcatgcttccaaacagagacccgtgtgtacttcgtcatggagtacgttagtggtggtgatctgatgttgcacattcagcgaggtcagttcggtactaagcgtgcgcaattctacgccgccgaggtctgcctggcgctcaagtacttccacgagaacggtgttatttaccgtgatttgaagcttgacaacattcttctctcacttgatggtcatgtcaagattggtgattacggtttgtgtaaggaggatatgtggtatggctccacaacaggtaccttttgtggtactcccgaattcatggccccggagattctcctggacaagaagtacggccgtgctgtcgattggtgggcatttggtgtgctgatttaccaaatgcttctgcagcagtctcctttccgtggagaggatgaggacgagatttatgacgctattctcgccgatgagcccctgtaccccattcacatgcctcgagactcagtctcaatcctccagaaattgctcactcgtgagcctgaccagcgactcggaagcggcccgactgatgcccaggaggtgatgagccagccattcttccgaaacatcaactgggatgagatgtaccacaagagagtgccgccgcctttcatgccgcagatcaagagtgcgacagataccagcaacttcgactccgagttcacaagcgttactcccgttttgactccagttcaatccgttttgtcacaggccatgcaagaggagttccgaggcttctcatacacagctgattttgactaa

SEQ ID NO: 322 - DNA, 5592 bp, Fusarium oxysporum
  source 1..5592: mol_type = genomic DNA
atggctatgagcctcccacagctcggcggcgcaggaggccctcacactcaaccctctttgccatcgttgccagcacatcttcaatccgatacgcatctcactgctcatctcgccagtcgcttccatgtctcgcatcctaccgctcgactgtcttctcacgctctcatctctctcaacacctataccaactcctcaaagggtcccgatggcggcaaggaggggagcgccatggctggcgccgaggaaatcgctgacagagcttttctgcgattaggacacagatccgagaaccaagccgttgtgtttttgggtgaatctggcgctggaaagtctactattcgagcccacctcctgactgctcttctcaacaaatcatcgacgcctctgtccacaaagctctctctcgccgcatatgtctttgatagtctcacaactaccaagactgccacaacacccactgcttccaagtccggtctcttctacgagttgcagtacgatacttcagccacaacaaaccctgttctgattggtggtaagctcttggatcatcgtctggagcgtagccgtatcgccgatgttcccacaggagagcgtaacttccacgttctttactatcttcttgccggaacaagcgaggctgaaaaatctcatctcggcttggacggtggttctgccactggaaccactcaaaagcgatggaagtatcttggccatcctactcagctcaaggttggaatcaacgatgcagagggtttccaagttttcaagaatgctctgcgaaagctcgagtttcctcgcgccgaaattgccgagatatgccaaatcctcgccagtattcttcacattggtcaactagagtttgagacaactagccagaccagcgtcactggcgatgatagtggtggtttctctcacgagggtggtacaaccattactgctgtcaagaacaaggatgttctcagcatcatcgctgctttccttggtgtcagcgccgctgacctccagaccactttgggctacaagaccaagatgatccaccgagaacgtgttactgttatgctcgaccctaacggtgctcgtgctcacgccggagagcttgcccgaacactttactctcttcttgtggcttggattcttgagaccattaaccagcgactttgtgctcccgaggagtccattgccaacactgtctcgatcgtcgatttccccggtttctgccagcaaactcccactggctctgcgctcgatcaacttctcaacaatgctgctaccgagtgcatttacaaccttactctccagaacttcttcgaccgcaaggctgatatgctggagtctgaggaagtcagcgttgctgcgaccagctatttcgataactcggacgctgttcgaggcatcttgaagcccggcaacggtcttcttagcattctcgatgaccaaactcgacgaaaccgaacagatatgcaattccttgaggctcttcgaagacgtttcgatggcaaaaacgctgctatcgaggtcggctctgcccaagctaagcttcctggaagcaacttcatgactgagaacacatctgctgtcttcaccgtcaagcactttgctggtgaggttgattaccccgtcaagggtctcatcgaagagaacggcgagatcatctctggcgatctcctcaacatgattaacggcactaagagcgagtttgttgcccgccttttcggtcaagatgctctccagactgtcactcaccccaatgaacgcactaccgttatgcaggctaccgtcagctcaaagcctatgcgagcgcctagtgtcatgtctcgaaagacgcatcgaactggtcgtcctagcacagcttacaagcgccagcagcaagaggccatggaggagttagatcagcagagccaggctggagagtctaagaagaacgccaagatgactctcgagcaaggtgcttcaggccagttccttgcctccctggacaatgtccagaaggctgtcactgaccctggcaccaactcatacttcgtcttttgcttgaagcccaacgatcgacgaattgcgaaccagttcgacagcaagtgcgttcgtatgcaggtccaaactttcggtattgcagaaatcagccagcgtcttcgatctgctgatttcagtttgttcttgcctttcggcgagtttctgggtatgacagacccggagacaatcttggtcggcagtgaacgagagcgtgctgagatggtcattgaagagaagcagtggccccagaatgaagtcagagtcggtgccactggtgtcttccttagcgaacgctgctggatggagattgcccagcttggcgaggcagtgtcagtttctggtcgctacggcggcttgccttcatcagatgctggtgatggtctcacacctgctgagtctatggctttcggtgcctccaaggaacatttggtttctggtggcaacacccctctcatgtacggtgagaaggccaagggtggttacttcactgatgacactcgatccgaggctggtgtttctgcctttggtggcggtgacatgttcaagaacctcgacacacgcgagcagatggctgagcgaggcaatgagaagtctctcgaggaggttgaggagtatagagataagcctagccgcaagcgttgggtggctctcgtcttcttcctcacttggttcatccccgattttgccatcagactgatcggacgtatgcctcgaaaggatgtccgtatggcctggagagaaaaggtggcgatcaacatgctcatttggttgatgtgtgctgtcgccgccttcttcatggtcggattccctatgctcatttgccccaagcagtatgtctacagctccaacgaactctcttcctacgacggtgacaagggcagcaagggcgcctacgttgctatccgcggtttcgttattgacctcaatgccttcattcccaaccattatcctggcagcaacctcgtcagcgaggatactctcttgaactatgccaggcaaggatatcatgcgctcttttccccatccaagtgtctgcctctgtgccagggcaaagatggtcagatccctcctgaggttactctcgacaaccgaaacaccaacatcactggtcagccccagcttcttgcctccagagatattgatgtcaactctgtctaccacgatttccgttatttcaccaatgacagccgacctgattggtacttcgagcagatgtacaccttcaagcatgtctacctcaagggacgaatgggttacagccctaagtatgtcaagaagctggcccgagatagctcttggaacgttgtcactatccacgggaaggtttacgacatgaccaagtacctccagggtggtctccgtttgaaggccaaggctggcaagcctactcccaacatcccaggtgccacagacttcatggaggacagcgttgtccagctattccgaagtgcaaagggccaagacgtttccaagtactgggataacatcaagcttagccctgtcaaaaaacaacgcatggagacctgcctgaacaacctcttctacattggtgactcagatactcgaaactccacccgctgtcagttcgctacatacttcatcttggctatttcagtcatgctcgcatctatcctggtcttcaagttccttgctgcgctccaattcggtggcaagaacgtgcctgagaacctcgacaagttcgtcatgtgtatgattcccgcttataccgaagatgaagactcgttgcgtcgtgctatcgactcgctttctcgcatgaagtatgatgataagcgtaagcttctcgtcgttgtctgtgacggtatgattatcggtcagggtaacgacaggcctacgcctcgcatcgtgctggatattcttggtgtcccagagactgtcgatcccgagcctctcagctttgagtctctcggtgagggtatgaagcagcacaacatgggtaagatctactcgggtctttacgaagtccaaggccacatcgttcccttcatggtcattgtcaaggttggcaagccttctgaggtctctcgccccggtaaccgtggtaagcgagactcccagatggttctcatgcgtttcctcaaccgcgtccactacaaccttgccatgagtcccatggagcttgagatgtatcaccagatccgcaacattattggtgtcaacccaaccttctacgaatatctcttccaaattgatgccgatactgtcgtcgctgcggactcagctactcgaatgatttcagccttcatcgatgatactcgcctgattgcttgctgtggtgaaaccgctctcaccaacgccaagggctctttcatcactatgattcaggtctacgagtactggatttcacacaacttgtccaaggccttcgagagtttgttcggctcagtcacttgtttgcctggttgtttctctatgtaccgaattcgcgctgcggagactggtaagcctttgttcgtcagcaaggagatcgttgaagactactccacgattcgtgttgatactctgcacatgaagaacctgctccatcttggtgaggatcgatatctcacaaccttgctcctcaagtaccactccaagtacaagacgaagtacctcttcagcgcacaggcctggactattgcccctgactcttggtctgtcttcctgtctcagcgacgtcgctggatcaactctactgtgcacaatttggctgagcttattcccttggcccagctttgcggtttctgctgtttcagtatgcgttttgtcgtcttcatcgatcttctgagcactatcgtccagcctgtcattgtcatgtatattgtctacctgatttaccaggtcgctaccaacccttcagttgtgcccattacagctttcctgctgctcggtgccatctacggtctgcaggctgtcatcttcatcctccgacgcaagtgggagatggttggttggatgatcatgtacatcgctgccattcctgtcttctctttcggtctgcccctgtactccttctggcacatggatgacttcaactggggtaacactcgtgttattgctggtgaagccggtaagaagatcgctgtttcagatgagggcaagtttgatcccaactcgatccctcgcaagaagtgggaggagtaccaagccgagctctgggagacacagacccagacagcccgtgacgatgtgcgatcagagatctctggttacagttatgccaccaaggctcaaggacccttctctgagtacggtggtggttaccagcccagccgccccggctcaacagctggcttcggccaccagaacatgtctcgcatgtctctggcccattctgagatgcctggcaaccgtgcgagccagtttggtggctcacagttcttctctcccgaggacctggttggcatgcctagtgatgacgccctcctcgctgagattcgtgacatcctcaagacagctgacttgatgactgtcaccaagaagggcatcaagcaagagctggagaggcgattcaatgttcccctagacgcgaagagggcctacatcaactctgcaactgaagccctgctttctggccaattgtag

SEQ ID NO: 323 - DNA, 1992 bp, Fusarium oxysporum
  source 1..1992: mol_type = genomic DNA
atggatctatcacagcgggcgcttccgcgtcacactcatcaccaaccaccaccatctctctcaaatccttcgccctcacatctgccgcctcaacattctacgtctacgtatagtcctggtcccgttgcctcgcatccaactctccctcttcccggaactcacccaccatcctcggctttgacaccaggatcggcctcaacatcccctgcatccatctcccaccggttaccttcagcatcagcttcgacgacatcaaggcatcctactggcgattatctccctgacgcagatgatcaagacgcgtcgacacccgtggatggagaggaacctccaaagaagaagcaaaagcgcaacaagccaactctttcatgccatgaatgtgtagagcgcaagaccaagtgcgacagaggtcgaccccattgtcttgcctgcataaaacgacagactgaatgccgatatgcccatgtcgcaaaccttctcgaggagaccaccaggtcagccgccaatggccgccgtatgacgaaacccccaaagaagaagtctggctctagtggaaagtcccccattccaaatatcgcagataggggtatgtcgaatgatcccagggcaacctcgcgtggcgctgttgccctctctatcggccttctgtccaacgttccttattccttgccttctgcaagtaacgtttttggtatcgggtccgagcacccatttgccaactactggacctgcgaagggggcttgcctgaggttatctcggtgcttccagacaagattcaagccgatatactacttagccgatacttcgaatgtgttgaccccgtgtatcccatgatacatcgccagacattctatgcggactacgaacacttctggcagatgaatcagcaagaaaagaccgatacagatccgtccttcattgcattaatctttgtcatgctggccctgggaactcagtttgtaacatcgactacatccccacaggagcgaaggcagacagcagagttctatgcttcggctagcaaccaagctctccgtatcgcatcatatcttagcagtgcatcgttacggtcaatccaggctatggtattgctagtgtacttccttataaacgacaaccatgcctcagatgggtgggcgtttgcaggtattctgattcggcaagcttatgctatgggtcttcatagagatccaaatattgtgactccaaatgccaccctgtttgagaagcagcagcggcgtaaggtctggcaagcggtacttctccaagatactttcttgaccgtcttactctccctgccaccgtctgcgacacatacagatgtttccgtggaagacctactcgacgatggctcctcgattgcaaatagcgacccaacagatacggcatatattcgaggctcttggactttggccaacttggttcaggagacgatctgctcaccaagatcgttagacctaccaatctgcactacggcaaggcataagtctaagttgattgctgacttccgagctgtttaccgttcgttccctgacgtcttccggtcttgggatcctgatagtatcacggcgctcgcgaaaaccaataagagggtggttcgtcagaccctgttcctgacgagcaactacttccataacttgatgcttgttcatgcttccgagagccctgatgttcctgtcaatgttcgtggtacactggaggcagcgcacgacgccattacagctttcttccttcttttcacccttcttgagatagaagcacgtgtttggtgggtgttcaaccaccgagctttcttggaggcgctgtgtatcggaaatgtcctgaaggaggctgctcgagaaccaggtggtgcagatatgatggcaagagatcctctccttgtcagggcaaaagctgatatcacacgcatgatccaaatcatgcaggttatgggcgaagactctgaggtagcgaggactcgagtgcaggttttgagtgactttctggcatga

SEQ ID NO: 324 - DNA, 1581 bp, Fusarium oxysporum
  source 1..1581: mol_type = genomic DNA
atggctcatcatcaagcgcggacgatggctatggatccgccacatatcaccgaatttgcttctgagcgttacttcgaaaagttaagccagctcaatgcacaccaacatcagcgtcaacctcctccgactcgagataatcttgatgcttccacctcgtcgccttcgagatttattcttcctctacgagaaacgaaaactgccgatgttgaacctctaaggccccttgaccagaagcgtgataaatcaaggtttttcggccttcgctcaaaggtctcgatcctccactctaaatcgagtgtcgcgtctggtcatgcgcctcgagtttctgttgagacgccgcaaaaaagtgctagcttcgatcagcttttcctaggacttcccaacgaattacagattcaaatcatttctgccctcccactaaccgacgtcctgaacctccgacttgcctccaaatcgtggcatactctcgtcactttcaacgaaaatactatcgctcgatatcatctcgaacatcatattcccgtttacgcctcccgcctctaccccatcacagacccgagcgagatcaacttccaacatctatgcgggatatggcatcgattacacgtcgctgccaagctcgcctttctaatgtgtgaatggattacaaaagatatctttcttcgccaaactgaagctcaacgacttgcatttgcaccccagaacgagcgcatgcggcgacgcctaatacctcttctatttaccatattccacttcttcgagacgtaccgaaaattgtacctaaagcgtatggctgagaacggaggaaaaggattgagacgggaaccttatactttgaacccgattgaagccgaaatcatgagtatgtacgacgaccaaaccttattaagggttcacgaagtttttccccttgtaatatcatcgttctgtcggagactccgaccaccgacatatgttggtagagtcgagcgatcacttcgtggctatattcgggagaaaccgtccgacgacatgcatgttgccattttgtgcattggtggactgcgacaagtggaaaggctttgggaaatcaagggatacaacagcaggcgtggtgctgttgacacatggtttaatgctctcacgaaagaggcgccacctactgaacagtcaacgtcgaaaccgaaacgaggtcttttcggacgcaaaaagtccactagtgaagctcgatcgtctggtactgcattgaacaaggtccggagttctggctcaatagatgggaacatggattgggaagccaatcttgtcttcaacacgagtttatctgctggggctcccatgtcacctcttacttcgcaacaggctcaggcattactcagcgaccttcccgtactgcaacaaatatggctcacaacagctgaggccctgatccttcagcgtcgggttgtcgagcgtccacaggatatcaaacgcaaccaacaggtcatgctggatttgatcagtgaagatggacttgtagaagaggacgaatggtggtacggccgcagcattcccgattctgtgcggcctcccgtcggtgtcactgatgacgatgcggattaa

SEQ ID NO: 325 - DNA, 723 bp, Fusarium oxysporum
  source 1..723: mol_type = genomic DNA
atggcgtggacgtgcagcggagacactaactcggctcttattgggaacatgtggaagaatggtctcattgccgaccctcgagtgaaagaggcattcctcaaggttgaccgagctcactacgctccagccatgccatatgaagactcaccccagcccatcggctactcagcaactatatctgcaccgcatatgcacgcctcagccatcgagcatgttctcagctaccttcttccctcatcgacatcgccggccccccgggtcctcgatatcggttctggatctgggtatctaacccacgttatggctgaacttgtcggtgagaagggccttgtagtcggtcttgagcatattcgtcagctgaaagaacttggtgaaaagaacatgtcgaaaagtgaggagggaagaagattgcttgagagtggcaaggtgagatttaggtttggtgatgggaggaaggggtgggttgaggaaccgagagagggagagaagaatgaggggacgggctgggatgttattcatgtcggggcttctgcagtggagattcatccagagctattggagcaattgaaggcacctgggtgcatgttcatccccgtcgacgatgacaagatggggtacaaccagcacgtttggagaattgagaaggatggaaatggggagattacgaagaagaagttgtttggagtccgctacgtgccgttgactgaggcaccgaaggcgtag

SEQ ID NO: 326 - DNA, 2790 bp, Magnaporthe oryzae
  source 1..2790: mol_type = genomic DNA
atggcgtatagaggtgctggagggccgggaggcggccgtgactacgatggtcacaacatgcaagacctaaaccctcacagccagtattccaatgtccaattgcctcctgggcacgagcaagaggacgaggcacacaggtcccttttgacccaaggcacaacgctctacgaccacgaccgactcggcgcccacacgcctccagtgcgtccagtctcggcctacagtctcacagagtcctatgccccgaatgctcccaccaccgttcctggctcggccgtcggcgcatctccctcgccatttcagaatgactatggtgtttcgtcgggctaccagggcgcaatgggcggccacgcagacgacggcttccccattggcggcggagacccccagcaaggccacccctacgataccgaggacagctgggtgcagcgccagaaccccaacgccgctccccagggtggtggtctgaaacgttatgccaccaggaaggtcaagctggtgcagggttcagtcctgagcattgactacaacgttcccagtgccatcaggaacgccgtgcagcccaagtaccgcgagcaggagggcaccaacgaggagtttatcaagatgcgatacaccgcggccacctgtgaccccaacgacttcaccctgaagaacggttacgatttgcgtccccgcatgtataacaggcacacggagcttctgatcgccatcacctactacaacgaggacaaggtactgctgtcccgtaccctgcacggtgttatgcagaacattagggacatcgtgaacctgaagaagtcgactttctggaacaaaggcggcccggcttggcagaagattgttgtctgcttggttttcgacggtatcgagaagaccgacaagaacgttctggacgtcctcgccaccattggtatctaccaagatggcgtcgtcaagaaggacgttcacggccaggagactgttgctcatattttcgagtacaccactcagctgtccgtcaccccgagccagcagctcatccgaccccaggacgacggccccaacactctgccgcctgtccagttcatcttctgtctcaaggccaagaatagcaagaagatcaactctcaccgttggcttttcaacgcctttggacggatcctgaaccccgaggtctgtattctgctggatgccggtaccaagcccagctcgaggtcgcttctcggtctctgggagggtttttacaacgacaaggatcttggaggtgcttgcggtgaaattcatgctatgcttggaaagggcggccggaagctgctcaaccccctcgtagctgtgcagaacttcgagtacaagatctccaacattctcgacaagcctctggagagtgcgttcggatacgttagtgtgttgcccggtgctttctccgcataccgcttccgtgccatcatgggacgacccttggagcaatacttccacggtgaccacaccctgtccaagattctgggcaagaagggtatcgagggcatgaacattttcaagaagaacatgttcttggccgaagatcgtattctttgtttcgagcttgttgccaaggccggccagaaatggcacctgagctacatcaaagctgccaagggagagaccgatgttcctgagggtgctgccgagttcatcagccagcgtcgtcgttggttgaacggttcgtttgccgccaccttgtactcactgatgcacttcggaaggatgtacaagagtggtcataacatcatccgcatgttcttcttccacgtccagctcatctacaacatcctcaacgtcatcttcacctggttctctctggcatcttactggcttaccaccaccgtcatcatggatctcgtcggaaacccccaagttggacagaacgctcgcgaaggctggccttttggtaacaccgtcacgccactcttcaacgccgttctcaagtacatttacctggcctttgtcatcctacagtttattctggccttgggtaatagaccgaagggatccaagtacacctacgtcacgtcattctttgtcttctcggtcatccaggcgtatatcctggttttgtctggatacctcgtcgtccaggccttccagacacctatcggcgagcagatcaagaccgacacggccaaggatttcatggatagtatatttggaaagagcggagccgctggtgttattctactcgccttgatcgccatctacggtatttacttcatcgcctcgttcatgtacctggacccctggcacatgttccactccttcccttactacatgctgctcatgtccacctacatcaacattctcatggtgtacgccttcaacaactggcacgatgtttcttggggtaccaaaggatccgacagtaatgaagctctaccctcggccaatattaccaaaggcgagaaggacgaagtcgtcgtggaggaaatcgacaagcctcaagaggatatcgacagtcagttcgaagcaactgtccgtcgtgccctggcacctttcaacgacgaggagaagcccgagcccaaggatctcgaggactcgtacaagtctttccgtacaatgctggttgttctctggctcttctccaactgtctcttggctgttgcgattactagcgataatttcgacgctttgacaaagaaccaaaacacggccaggactgcctctttcttccagttcttgctgttctcgaccgctttcctctctttgatccgtttcatcggattcctctggttcttgggcaagaccggtataatgtgctgcattgcccgtcgctaa

SEQ ID NO: 327 - DNA, 5619 bp, Magnaporthe oryzae
  source 1..5619: mol_type = genomic DNA
atggcacaacaccttccgcctgtcggcggcaacggtggtgcacacacgcagccttcgctacccgcgctgcccgcccatcttcagtccgacacgcacctcacggggcatcttgccagccgattccacgtcagtctgccaaccgccaaactatcttcccacgccttcatctcgatcaacacatacacttcctcgagcaagggacaagatggaggcaaggccggaagcgctcaaggcgaagctgaggatatggccgacagggctttccttcgtctgggccaccgttccgagaaccaagcaattctgttcctaggtgaatctggctcgggaaagacgaccattcgatcgcacatcctgactgcccttctgaacaagacctccacgcccctttctacaaaggtctcactcgccgcatatgtcttcgacaccctaaccactactaagactgcgaccactccgactgcctccaaggcgggtctcttctacgaactccagtacgacacagcatcaacaacgagcccgctgctcatcggtggaaagctgctggatcatcgtctggagagaagtaggattaccgacgtgccaactggcgagcgaaacttccatatcctgtattacattttggccggcacaagtgccgctgaaaaaacccacctgggctttggagagcccgatgctggaaccggaagcaagcgatggaggtatcttgggcacccgacccaactgaaggtcggcatcaacgacgctcaggggttccagctcttcaagactgccctccgcaagcttgaattccctaggagtgaaattgcagagatatgccaagtcctggctagcattcttcacatcggacagctcgagtttgagagctcggaaaacacgacagttgccggcgatgagagcggtggcttctcgcatgagggtggccagatcacaaccgtggcaaagaacaaggacgtgcttgctatagtggccgcatttttgggtgtcagtgccgctgagcttcaaacaacccttggatacaagaccaagatcattcacaaggaaagggtcactgtgatgcttgaccctgctggtgcacgcgccaatgcaaatgaactagcccggactctttactccctccttgtggcctatgtcatcgagaacattaaccaaaagatctgcgctcccgaggaggccattgttaacacagtgtccatcattgacttcccgggattctcgcagcaaagctctactggctcatccctcgatttgctcctcaacaatgctgctgccgaggctatgtacaacttgaccttgcaaaactttttcgatcgcaaggctgatctcctagagaccgaggaagtcagcgtcccacccaccagctactttgacaactccgacgcagtcaagggactgctcaagaccggcaatggtctcttgagcattcttgacgaccaaaccaggcgtcaccgcaccgacatgcagctcctggaaagtctgcgcaagcgcttcgagggcaagaaccctgccatcggcgtcagtgcagccaccgcaaagctaccgggcagcaacttcttgtccgagaatactgctgcttccttcaccgttcgccacttcgctggtgaggttgaatattcgatcaaggggctcgtcgaggagaatggcgaagtcatctctggtgacctcttgaacctggtcaactctaccaagagtgactttattgctcgtctcttcggtcaagaggccctgcacactgttacccatccgcaggagagaaccacggtgatgcaagcttcagtcagttccaagcctatgcgtgccccaagtgtcatgtcgcgcaagatccgaccgggaacggctcgtactactcgccaacgcaaggagtcaatcagtgggcgacaggacaccctagacgatattgccagcgaagccggagattcccggcgccccgtcaacaagccatccgaggaaggcgcttctggtcagttcttacactcgcttgacaacgtgaccaagtctttccatgcacagaacacaaacgcctattttgtcttctgcttgaagccgaatgacaggcgcattgcgaaccagttcgacagcaagtgtgttcgcacacagatgcaaacatttggcattgccgagattagccaacgtatcagatctgcagacttcagtgtgttcttgccctttggagaattcctgggtcttgctgatgttgacactctcctcgtcggaagtgaacgggagaaggtcgaggctgttgttgatgagaagcgctggccgaccaatgagatccaaattggttccacaggtgttttcatcagtgaacgatgctggatggagatcgctcagctcagtgatatggtaaccggccgattcggcgtgcccgaatcggagggcggcacgccactcgccaacatgccctatggcgcttccaaggagcgcctcatagcggctgggaattcgccatacaacaatgacaaggccaagtcgggctactttggcagcaatgacatcgatggcaggtcagacgctggagtttcggcttttggcggaggcgacatgttcaagaatctggatacccgtgagcagatggctgagcgtggtaatgaaaagtccatggttgaggtggaggagttcaaagacagcccgagccgcaagcgctgggttttcattacctggatgctcacatttttcgttcccgagttcctgatacagcatctcggtaaaatgccccgcaaggatgtgcgtatggcatggagagagaagttggccatcaacttcatcatctggttcagttgcttggccgccgctttcatcctggtcgtgttccctatgcttgtttgccctacgcaatatgtgtttaccggcgaagagctctcggcctacaacggaaaagatggcaaggcttcgtatgcagccatccgtggtcaggtctttgatatcggatcgttcatccctaggcaccccctgccctatctgccatcaaagctcttcacccagtacgctggcactgatatcaccggtcttttccctgttcaggtgtctgctctgtgccaaggcacgactggctctgtcaaccctgccgtgctactggattacaaagacaccaacatcaccgactcgcccaacgtttttaacagccaggatctgaattcgcgctatcacgactttcgttacttcaccaacgatacaagacccgactggttctctcagatgatgattacgttccggggcacgtataagaagggcaacatcggctacccggctcaagttgtccagaagatggcccaacaaaggaacgccatcgcaatactcaatggtcgggtgtacgatttcaccaagtacatcgctggaggccgcgatttcagggtcaagtataacgaaacgcgtcctaccgaccagagtctactcgactttatggacccgtcagtcgtgaggcttttctcggaccgtagcggagaggacgtcacgccgctctgggatgcacttaggctggacccgactttacgaaagtcgatgcaactctgtctggataacctgttttaccttggcgatgtcgatacgcgtaactcggtgcgttgcaactttgccaaatacttcatcctggctgttacgatcatcctttgctccatcatcgccttcaagttcttggctgcgcttcagttcggtaccaagaacatgcccgagaacctggacaagttcatcatgtgccagattcctgcctacaccgaagacgaagagtcgctccgtcgcgccattgactctgcagcccgtatgcgctacgatgacaagcgcaaactcttgatcgtcgtttgtgacggtatgattattggtcagggtaacgacaggcccacgccgcgcattgtgctcgatattttgggtgtctcggagacggtcgatccagagcctctcagcttcgaatctctgggtgagggtctcaagcagcacaacatgggcaaggtttactcgggcttgtacgaggttcaaggtcacatcgtccccttcttggtggtcgtcaaggtcggcaagccatccgaggtgtcgcgccccggtaaccgtggcaagcgtgattctcaaatggttatcatgcgcttcctgaaccgtgtccactacaacttggccatgagcccgttggagctcgagatgtaccatcagatccgcaacattattggtgtgaacccgacattctacgaatacatgcttcagatcgatgccgacacggttgttgctgccgattcagcgactcgtttcgtctcagctttcctggatgacacccgcctgattgcatgctgtggagagacgtcgatcgccaacgccaaatcttcattcatcactatgattcaagtttacgagtactatatttcgcacaacttgtccaaggccttcgaatctctgttcggctccgttacttgtttgccaggttgtttctccatgtaccgtatccgcgccgccgagacgggtaagccgctcttcgtctcccgcgaggttgtcgatgcatacgccactatccgcgtcgacacgcttcacatgaagaacctgcttcaccttggtgaggatcgttacctgaccacgcttctgctcaaataccacaacaagtacaagaccaagtacatttaccgagcacatgcttggaccattgcccccgactcatggaaggtcttcctctcacaacgtcgtcgctggatcaactcgacggtgcacaacttgatcgagcttattcccatgggccaactttgcggtttctgctgtttctcgatgcgtttcatcgttttcatcgatttgctctctaccatcattcagcccgtcaccattgcctacattgtttacctcatcgtgcgcatggtcctcactcctgatctggtccccgttctggctttcgtgctgctcgcggcagtttacggccttcaagctatcatcttcatcctccgccgcaagtgggagatgattgcatggatgattctatacattatcgccatgccaattttctcgtttggtctgcccctgtatgccttctggcacatggacgatttcacatggggtaatactcgtgtcgttaccggagagaagggtaagaaggtcgttgtcactgacgagggcaagttcgatccctcatccatccctcgcaagaagtgggaggagtaccagagcgagctgtgggatgcccagacctccaaggatgacaccaggtctgaggcttccggcttctcgtacgccaccaaggcccccgtcgcggtctccgagtatggtttccccgtcaacccctatggcgcataccctcccagccgacctgggagcaccacgggcataccacacatgccacacatgccatactcggccagccgcatgtcattggcccattcggagatgctcatggcgggcaacagacaaagccagttcggtggatcacagttcaacctccctcaatctggcagcgaaatggaactttcaaacctggctggcttgccatcagatgatgccttgcttgccgagattcgggagatcctgagaacggcagatttgatgacggtcaccaagaagggtgtcaagcaagagctcgagcgcaggttcggtgtaaacctcgacagcaggagggcgtacatcaacagcgccaccgaagcactcttgtctggccagctgtag

SEQ ID NO: 328 - DNA, 2487 bp, Magnaporthe oryzae
  source 1..2487: mol_type = genomic DNA
atgggcaatccctttgaaggatggccggtacacgatatcgtttacacggtaatcgtcggcctggtcatgttggctgccgtcctggagtggttcctctgggtggcggccttcatgtattgtcttgttaaggtgtttataaaggcggagcattggacgattcgggctctcgcggttgtggttgccatccttttcgtcggattcagagcggtcttcttgccaatcatggtagtgacactgcccttaccaagcgctattgtgaaactctggccggaagacatggttgtgggactacagtggtttgccttctgggcgttcgccggtctcctgacgatcccatggcttttctgtgtctaccatttcgtcaccaaccagctaggccgagagaagcgtgtcaagcaggtgctggatgaggtctcggccccaaaggttgtcatcgtcatgccttgctacaaggaagacccagaggttttactcgtggccatgaactcaatcgtcgactgcgactacccgccatcttgtatccacgtgttcctgtcctttgacggagaccaagtggacgagctttatctcaacacaatcgaaacggtcggcgtgccgctcaccttggactcgtaccctaagagcatcgacgtcacttacaaggctgcccgtatcaccatctcccgcttcccccacggcggtaagcgtcactgccaaaaggcaacgttcaagctcatcgacaaggtctacaaggaatacctcgagcgcaacgacaatctcttcattctgttcatcgacagtgactgcattctggaccgtgtgtgcctccagaacttcatctacgacatggagctgagccctggaaactcgagggacatgttggccatgactggagtcattacttccacgaccaaaaagcacagtcttattaccgtccttcaagacttggaatacatccacggtcagcttttcgagcgtacggtcgagtctggatgtggtgctgtcacctgtctgcccggagctctcaccatgttgcgtttctctgcgttcaggaggatggccaagtactactttgctgacaaggccgagcagtgtgaggatctcttcgattttgccaagtgccatttaggcgaggaccgctggttgacgcacttgttcatgatcggtgccaagaagcgataccagatccaaatgtgtacctcagccttctgcaagaccgaagccgtgcagaccatgcagtctctggtcaagcagcgccgtcgttggttcttggggtttatcaccaacgaagtttgcatgttgactgactggcgtctatggacgcgttacccgctcttggtgttgatccgcttcatgcagaacaccattcgtaccaccgctcttctcttcttcatcatggttttggctatccttaccacctcgaagcgggtcagtgacctgcctgtcggtttcatcgccatctcgctcggtctcaattggctcatgatgatctactttggcgccaagctccgccgcttcaagatctggctgtaccccctgatgttcgtactcaatcccttcttcaactggtggtacatggtctacggtattttcacggccggtcagcgcacctggggtggacctcgtgccgacgccgccgccgccgacggagacaccaccgcccaacaggccatcgaggcggccgagaaggccggcgatgacctcaatatcgtgcccgagaccttcatcccggcggcgcagatcaagcgcaaggagagcggcaggcggcgcatcgtggccggtggcaacatccagccctcggccaagatcgacggcatgtttgccatccccgagcgtggcgccaacggttggtaccagcacgacaacatctcgctattcacggttgcccacggccacactggccgcgttcctctgcaccctcgtgactcattcgacagtttcttgtctgcgcagacggccctgaactcggtctacatcccgcgccgtgtcgagagtataatgggtgacgaggatcggcgcaagtacgagctcgcccaggccagccagtttaaccagttcctctccaaccagcgccgctcgaccaacggcgagccgccgcagggccaggtgtacgagtatagtgacgtcgacctgcaaaaggccgggtacactgacaacccgctgccgcccacgcctggagagactgcctctgctgttcctgccgccctcaatctgcaccacaaggttggcagcaccgacagcctcgttagtcttgggtcttcagcgtccaacagcaaccaacgggaccgcggaaggcagcgcaccctgatgccaccaacctcctcacaggcccggaccggtaggagtccactcggccgggcgagcttcttgcgcacgtcgacgattgaggacattgagctggagattggcacaagccatggaagcagcgcaaacagacctgcactgagcaggcaagcgtcgaacaacgaccccaacaacagcaacagcggcggccatcagcaacggtag

SEQ ID NO: 329 - DNA, 1158 bp, Phytophthora infestans
  source 1..1158: mol_type = genomic DNA
atggctccgactgtccaaacgtgtgatcctgtactggtgtgcgaccctgtcctcctgtgtgaccgaagtgactccgtgctggcgagcgaccctgttccgccacagaatctctcgttcgtgctcgaaaaggggggagcagtcaagtttgaagatcgtcccgtgcctgaaattaaggacccacatgacgtgatcttgaacgtacgctacacgggaatctgtggtagtgatgtgcactactgcacgcacggctgtatcggcaagtacgtggtggataagcccatggtgctaggccacgagtctgctggcgtcgtccatgccgtgggatccgccgtcaagtctctcaaggtaggtgacgaagtggccatggagccgggtgtgccgtgccgccgttgcgtccgctgtctcgagggaaactacaacttgtgtccggatatggcgttcgcagccacgccgccgtacgacggcacactggccaagttctaccgcatgccggaggacttctgctacaagctgccgtccaccgtcagtatgcaagagggagcgatgctcgaacccacagccgtggccgttcacttctgccgtctggccaaggtgtccccgggtcagaaagtcgtcgtgtttggtgtcggtcccgtgggtctgttgacctgcaaagtggctcgttacgtgttcggagccacaacagtcgtcggcgtggacgtcaatgagaaacgtcttgcggtcgccaaggaacacggcgcgacgcacgtgtatcaggggaagtccggcgtgacaccacaggagtcggccgagcagatcattgccgagtgcggactgggcgacggggccgacgtcgtgattgacgcgagtggagcggagccctgcattcagacggcaatctacgtcgcacgcagcggtggcacgttcacgcagggaggtatgggcaagacagacatcacgttccccattggcatcatgtgcggcaaggagctccgcgtgaccggcagcttccggtactctgcaggcgactaccaactggcgctcgatatggttgcaagtgggcagctgaacgtcaagggtctcatctcgaagattgtgccgttcgaggaagccaaggaggctttcgacaatgtccagcgcggtaacggcatcaagtggctcattgaaggacccaagtga

SEQ ID NO: 330 - DNA, 3907 bp, Fusarium graminearum
  source 1..3907: mol_type = genomic DNA
gatcttcgcttggccttgctccactaagaaggagtttcactagcggcccgcgatagctagcctgatcctagtctttacctcctcaacagtaacaccttctttcaccaccacaagctgagtcttgctcctttgttggaaacagtgaccggattcacacctgacctctggcaatcaataatttttgacccaagtcaggaacttatggctctgtgacagcaaacaagcgctgctgttgctgatttgctttggctgccattcactgacattgattgactggtggcaactaccaacaaacaccttctctcacataaatatacctactacctatctaattcctctccaatttcttccccgtcaactctctttctgcgcatcagcacacggatatcaactaagaatatgagcgacatttatcaacactctttcttgaagttttaaaacacaatatctttacttctttcgctatcaaacacatccttacatacattgacatcctctttggcccattctttgagtacccagacattatctcatcatggcggacagaggtgatcgaggcggccgtggaggccgtggccgtggcggacgcggcggcggctatcaagatggtcgaggaggcggacgaggtggcggagatgggagaggacgaggtgatggtggtttccgtggcggcagaggacgaggtgagggaggacgtggtgacttccgaggcggcttcagtggtcctagaggcggccgtggaggttctgatcgcgggagaggaggatacaggggaggccgaggtggagggcaattctcaaacgagccgtctttcttcaagatcgaatccggtgttcctcagcccgatgctgctattaccaagctcgaggatgaggtggtaaagaatcaaaataattctgttgcccagcttacatcgaaaatgtccaagttgggagtagaagaaaaggagcatttgagcaaattccctccacgacctgcatttggaaacaaaggccgtccagtcactttatgggcaaactattaccagatcgacaccaatattcccatgcttttcaaatacacaatttctgtcaaagagatcgtagctgaatcagaagaaaagaccgacaagcccactgtcgcccagcctaaggggaaagggaaaggaaaaggcaagcccggaaagcctaagaagtccggttctgtcgaagtcaagggacgtaaacttttcttggtcatcaaagagactctaaacgagctcaccaagaaggacaagagcctgcttcttgcgaccgagttcaagtctcagcttatctccttgcgcaagcttgaccttggacttgacaactcatttcgagtaaacctcccgtcatcagcaaaccccgacaagaccgaagtctttgaagtgaccttaaatggccctgaagtagcccgagttgacgagatgctcaagtacgtcaaatcgaataccagtgcttcacatgacgccccaggcaaacttgccgacgacgacgacgatgcagcaaaagccctggcattcccaaaattccctgatgttgttgatgccctgaatgtcatctttgggtttggcccgaggtcgaacgaagacattagtgctgtcggaaactcccgattcttctctttcaagaacggtggtatctgcagggatatgagcatgcgtgggagacccttacaagctgttcgtgggacattccagtctgtccgcctaggtaccggccgacttcttttaaacacaaacatcactgttggcattttcaagatatccggtaactgtgccaagctcttccaggatctcaatgtctttgaagcacagaagtcggaatggcggaaagtgaataacgcgaagttgatgaacaaatttctcccaaaaacccgcgtactggcaacgatgaagtttgccaatgacaagaaagtccaacgacggaaagcaatttacagtctggcctatgcacctgagattgaacgagcctgtcgtggcaacgatcatcctccccggttcacgaagggttatgaataccctggaccaggcaacgtgagcttctacatggtgtctgattctaaagggaccggtgaatatatcactgtcagagaattctacaagcggaaatacaacgacactacgctcaaagactaccctcttcttaatctcggcactgccgcaaacccgaactttaccccagcggagtatgtcgagatcctaccgggacagtcagtcaaggcgaagttgaatagccaagaatcgaccgcgatggtcgattttgcctgtcggtcaccttacgccaatgctttatccattacgaaagatgcgcgggaaactctaggtcttgacgacgagaaattggtgtacaagcccggcaaaagcatacaaaaatggacctatgtcaatgtcaaaccaggaggcaggtctgggccggttccaaagcgcactgtgatggaatttgctcaggtcatgagacaaatgaatattggaatcagcagcaaccctgtagacccttgcacagaggtcatcacccaagaagattacgctcaaggacgttcagatgctttcttcaaatgggcgaagcagaatcgcatagagtttatacttgtgattcttggtacatcagagtccgaaacatacggcaggatcaagacattgggcgactgcacctatggtattcacacctgctgcgcccaggccgaaaagtttggattcaacagaaaccctctgccatatttcgccaactgtgctctcaaatggaacctgaaggcaggtggtgtaaaccacaagctccacaacgagttcggtctcattaaagagggcaaaacgatgttggtaggatatgacgtcacccacccaaccaacatgccttcaggccagggtgatgatgctcccagtttggtcggattggtggccaccattgaccgagatatgggacaatggccagcctactcttgggaacagtcgtccaaacaggagatgttggacgagactttgactgaagcattcaagtcacgacttgcactttggcaaatgcacaaccgacagcagctgcctgagaacatcgttatattccgtgatggcgtgtcggagggccagtttgcccaagttttacaaagagagctaccacgcattcgcattgcctgcaatgccaagtaccccaagaacaagccaccaagaatttctctgatcgtttccgtcaagcgacatcagactcgcttttatcctacttcttccgagagcatgacgtccaagaacaatatcgaaaacggtaccatcgtcgatcgtggtgtcacgcaggctcgatactgggacttctttcttactgcacactccagcatcaaaggcacggctcgccctgcgcactacactgtgttgctggacgaggtcttccgagcgaagtacggagccgaggcagccaatgaattggagagatatgcccacgagctctgctacttgtttggccgagccaccaaggctgtgagcatttgccccccggcatactatgcagacgttgtgtgcactcgagcgagatgttacagacctgagttcttcgaaatcagtgacgttgaaagtgtctcaacagctgggccgggcttaggtgccagtgacccaaagcaggtccatgcggacctcgccaactcgatgtactatatctaagtgtgccgtgtgtgggagatgagttcgctcttttgggctacaaacagagacgagaaatgaagcttttttttttggggggggggttttttttgggaaattggtaggtttctgttaaaggtatgaggtagcgggatatctttgattgtctttcgtttggtttatatcgttttgtcctcatctttgacttaggacagaatagttaggatagcggaaacagcttgcagtcttgtatttggtacttgaagttgcaaggttatacatagcaat

SEQ ID NO: 331 - DNA, 2955 bp, Fusarium graminearum
  source 1..2955: mol_type = genomic DNA
atgtctgatagagggcgctcaccctctccagggggtccctcagggcctgggaggcgaccttcacagtccccagcccgatcggcaactggctctggtagtggacctgctggcggctatgcaaagcccctgggctacgatcctgcgaagcctccaaagcaggaggaccagggaaacacacgaatggaactacctccagatgcgtacatttccgagaccaaaaaggatatgtttactttaagaaacaatcgtttcaacactgagggaaagcctgagcacatcgaggtcaaccagtaccgaatgaccaagttcgacttcaacaagaagatctaccagtacgatgttgtactttcgcctagccctgacaagatcggtccggtcatgaagaagatttgggctcatcctgttaccgtgaagaccatgaagccctacaagcttgagatgtggcttttcgacggtaagaaactggcatggagccccgcgcttgtcgaccgtggtgaacttcggttcagtgtcgatctagacgaaggccaacgtcctcctggagccaagcctcgggatggtggcaagttcctagtcactattcgaaagaccaccgagatccaagttgctgctctgcagggctatctgtctcacaagatgtccttcaataacagtgttcaagaggcactgaacttcattgatcaccttgttcgacagttcccctccaggaacctacttgctatcaagcgaaacttttaccaaactggtcgacctggagctcctcttcaagacggagccatcgttgaggtccacaagggaacctacgcttcaatccgaatgagtgacaacttgaagcaaggtggtgtcggacttggctacaacattgatgtcgccaacacctgtttctggattggcaaccagccattggacaggatggcctgcaactttcttgctaccattgacccaagcaagttccgaggacacactcctgcgactctcaatgagatcctgaagccagtcaggaataggagtggcgggtgggagtcatctgatggcttcaagcaacttcgcaagttgcgacgcctcaaattcaagatcaagcacaagggccgcccaaacgaggacaagctgtacacgatcatggactttgcattcgatgccaagtttggtgaagctggtcacacctcccgcacccacacctttgagaaggatggaaaggacatcagcgtctatgactactacaagaaaatgtacaatgtcaccctgcgactttcccaccttcctcttatcaacgctggaaagggtggcttcattcccatggagcttgccttcgttgagagcatgcaacgatacccattcaagctcaaccccgaccagacagctgcgatgatcaagatcgcggtcacccgccctgccgtacgcaaagccgacatccaaaagggagctgccgctcttcagatcggtcaagatccttatctgagggagtatggtgtcaatttcgaagcccagtttgcgaagaccgaggctcgtatcttgcctccccctactgtcaggtttggccagggcacagcggaacccaagttcgctggtcgctgggacttgcgaggaaagaagttcttcaagcagaacaccgcccccctccagaactggggctttgttgcctgtgaagcacctgtcccacaggctgttctttcagcattcgccacaacattcaagaccactttccttggtcatggcggcaaggtgactggagaccccatgcttctcaatgcacctagcaacctgcgttttgaacccggaaagctggttgagtgggctcatgaggagatcactcgccgaaaaggctacacacaactcttgttcattgtcgtgtccaagaagaacagtggtacctacgagcgcctcaagaagtctgctgattgcagatacggcattctcagccaggttgtccttggtagccatgtgcagaagaacaatggccaataccactccaacgtttgcatgaaggtgaacgccaagcttggtggtgccactgcctgcacgcctcctctgtggaagactcccacattcttccccgacagccgcccaaccatcattgtaggttgcgatgtctcccacgctgctcccggtggtgcgactgcttcagttgcttccatgaccatgtctgtggaccccaatgccactcgatacgccgcagtcgctcagacaaatggatatcgcgtcgagatgcttacccccagcaacattcgactcatgtttgcagaacttcttcctcagtggcgacacaaccacccaggaaagatacctgctcatctgatctacatgcgagatggagttagtgaaggccagttcgctcatgtattggagcaggaggtatccgaaatcaagaaattctttggaggcagcctcccccccgacaagattcccaagatgacagtcatcatcgctacgaagcgtcaccatgtacgcttctttccacagaggggtgacaagaacggaaatcccttgcccggtactctggttgagaaggaagttacccaccctttcatgtttgacttctacctcaactcccatgttgctatccagggaactgcacgccccgtgcactactcagtgattctggatgagatggctatgccagtgaatgatctgcagaagatgatttaccagcagtgctattcctacgcccgctcaaccacccccgtctcccttcacccggcggtctactacgcgcatctcgctagcaaccgagctcgtgcacacgagaacgtcgcaaccagtgatggatttagaaccggtgccaaggggcatgagattattcgggagaagcaagcccatggcatcacctcggacgctcctaacaggaccgctgatgcaccccccctgatccgtctaggaggcccttgtggacagactcctgctgatggcgagaagcgccaacgagattttttccgcagtaccatgtggtacatctaa

SEQ ID NO: 332 - DNA, 1494 bp, Fusarium graminearum
  source 1..1494: mol_type = genomic DNA
atgtcggacctacaaagccgcttggagaagctgcaggagcttttgggcaacggcgtgaagcttgctgaaacgccacacgaagacaacacaacagatggttccgctgcaaatggccttgggaatagcttcggaatggtgatggatgatgagtacatccggaacgaggagcggcttgcagctagagagcaggcctcccaggaacagctgcgagccgatgctgatgccgccagacaaggcctgctcaaaggtaataaggaaaaagccttcgacaacgctgcttttcgcatcggccagcccgttcacaaggactttgctttctgtccgtttaaggtcgtcgtgtcgtatcccgaacgtttcatcggcaaggccaacaagcctcgtgtgaagccatttttcactgaaattctcaagggccgaacttgggactttttctatcttcatgacccgattgagccagccagagacccgtacctcttgattccatccgcccagttcgaggttttcctcgaagaaatcaatctcaaactgaacactttcctcagaatccctgtttgtcccatgaacaaggacaagttctacatgaagtttggtgaaggcggcacccctcgtcctcgttacttgagacgatctttggatgcgacctctcttgacatccggccgtggcctgcagtcgaccccgaagacgtcagatccttcgaagctgcctcggcaccgcaaaagctcacctggaggtccaagatgcgaatcgttaagtccggcttcgcaccaaagaggacggcagatccagacaaggctgcgaagaagaagcgtcacagggaccaaatgctgcgcaacacattgggctacttgggtcttgcgggagatccggatggccacgacatcgttttcatctgtgtcgacgttgaagccattgaacgtaagccaaaccctatctctgaagttgggatttctatcctggacacacgggacatcaaaggcgttcaccctaaggatgctggtcgtggttggtggcctatgatcaagactcatcatcttcgagtgcatgagtatgccagtttacgaaactaccaatttgtcaaggggtgccctgactcttttgactttgggaatagcgtattcccttacaaggacgagcttcaagaagtcatcatgagcatctttaacccctatatttcctctcaacgggaacttgtcgtcgttgggcatgatgtgcgacaagacatcacctacttcaacgatataggtatagatctccgagcccttgcaggactgagagagcctatcgacacccagggcatgcaccaagcttggtgcagctcaaccaatggacgaggcctcgtcaccgtactcaacgatctgaacattccaaacaagaatctgcacaacgccggaaatgatgcccactacacgctctgcgccatgctaggaattgcggtggtagaggtcaatgggaacgagcaacagagcaacgaaatgcttaacaaggttgactga

SEQ ID NO: 333 - DNA, 4488 bp, Fusarium graminearum
  source 1..4488: mol_type = genomic DNA
atggacaccgactcgaccgacagcgaagatgatcgcgttcagtatcgcctgaccgtgaggccttcgaagcatcgaaagaatacagagaagaagcgcctgaacaagcaggttttgaaacaatacatgatagaacacgacagagaagcctatgccaaagattctgagaaaaagaagcgcggccccttcgctgaagcttccaccgacattacaccgcgagaatatcagatagaactcttcgaagccgccaaggagaagaatctcattgtggttttacctacaggcacaggttctggtaaaacactcatctccatcttattgctaaaatactacattcgaatcgaagtggaatctcgcgctcttggaaatccgaggaaggtggcctttttcttggtggaaaaagtagccctctgtgagcagcaataccgatttcttaaggaccagattttcggccacaacattgtcatgttcacaggcgataaccgcggcgtgaccaaggacaagaagtactgggatgatcagttttcctcaaacaaggttgtggtctgcactgctcacattttgctcgactgtctgaacaacggcttcattacaatggaccagatcaacctcctcatcttcgacgaagcccatcatgcaaagaagaagcatgattacgcgcaaattgtccgacgatattattattctaccgaaaagaacaagagacctcgcattctaggaatgaccgcttcccctgtggattccaaggctggagatgttgcagaactggcacttgaacttgagaaaacccttgacagcgagatcgcaacactctccgacaagatgatgcgacaggcgactgatttccaagttcatgttgaagagacagtcaaatacaacacacttggactaccagacgagaccaagacacagctttgggactcgatctctaagctagtatcgcgaaacaaggaattcaaggcgtctctcgacttcacaaaagaggcctccacaatcctaggaccctggtgtgcggaccgatactggcaagtcttgatcgacgatacagagatcaagcgactcgccgacaggactcgcatggcttttttcgggggtggagagaagttgttggcaagaggagaccaagcagaagaggctgtcagggaggttcaaaaggtcgtcgcagcccacgagtttagggcgatcagtcctcaatcgcaggaattgtcagctaaagtgaaatgtctacatgaaatcctggttcatgccttcacagtcgataacacaaagcgctgcatcgtttttgttgatcagagacacacagcttgcctcctttcggacctttacgaccaagtttcaatggcaattcccggtatgaatgcttcgtatatgattggtcaacaatctagcagcagcacccttggcaatatgtctctgcgaaagcaatgttcaacgctcaagaactttagggacggcgtgataaactgtctctttgcaacatcagtggcagaggagggaattgacattccgagttgtgatcttgttatccgatttgatctctatacttctgttattcagtatgttcaatccaaagggcgtgcgagacacgaatcttcacggtatatcaccatgctggaagacggcaacatgagacagattcgcagtctgaaacaagcagcgagagatgcaacagcccttcgagagttctgtctaagaatacctgccgatcgaaaacttcaagacgatgtatttgatgaggagacggaaagtcagatcaagcaaatacgttttaacgtgtacaaaatagaatcaacgggcgcacaacttacattcccctcaagcctcgagatactagctcgattcgttgcatccttgggtacagcagagagcagccatagcaaggctgaatatcacgtctacaaggtgggaacatatttcacagccgccgtcaatctaccgtccagttcccccatcgtctcccaaacaggctatccacaacgaagcaagcttctcgcaaaatgctcagcggcttttgaggtttgcaagaagctcatcaatggcaaacacattgatgatcatcttcagcctactttcaagaaacatttccacaaaatgcgcaatgctcgtgtgggaataagccctaacaagaagggtgagcatgacatgcgcctgaggcccaacgtttggagtatccgtggagaatggacacacttcttcccaacaagaattactcttgacagggattgtggagagaaaaacaggtcgttgattcttctttcgcgaagtccacttccaggactaccttcaatccctctattcttcggcaatggacgctcagccatcgttgaagtgacatgttctcaagaacctttacccatcacgaccgaggaagctgggggtttgactgctttcacactcaaaatctttgccgacgttttcagtaaagagtttgaggccacttgcgaccagtttccttaccttcttgcccccttggcaaaagacaccaatctaaacgaaatatcgcgaatcgactgggatactgtcaaccttgtcagagaccatgacagtctcgaatgggagaatgcgcccgacgatttctttttcgacaagcttgttgtagatccatatgatggagggcgcaagcttataatcaaaggcattgacaaatccaagaagccttctgatcctacaccggagggagtgcctgagtcgagaagtcgtgcttataggtctgcggaacaaaacattaagcagtacagcaacagtctgttttccaagtctcgactaacggcccagtggcgagacgatcaaccggttgtcaaagctgagcttctctcattgcgacgcaatctgttggacgagtttcaagtaaacgaggaaatcaacaaggattgcttcgtcattttagaacccctcaacgtgtcacctctgccaattgacgtcgtttccatggcactcaagttcccggcaatcatccacagaatcgattctgctctgatcgctcttgatgcatgcgaactattcgacctctctattccgccagcgctggcactcgaggcaatgaccaaagacagcgacaacactgaggatcatggcaagcaacaaatcaatttccaagctggcatgggttccaactatgaaaggttggaatttcttggagactcgtttctcaaaatggccaccacaatctccatttttgtactcaaacccaagagcaacgaatgtttgtaccatgtagagcgcatgctgctcatctgcaacaacaatctgttcaacacggccgtagattgcaagctcccagagtacatacgatccttggcattcgacaggcgaacttggtaccctgatcttacactcagaaaaggcaaagctttcaaggcaacagcgcgacagcgcttagccgacaaaagtattgcggatgtctgtgaagctctcattggtgctgcatacctctcaagcaaggatgacaatttgaacatggccgtcaaagctgtgtcacagatgtgcaaagcaaagtaccataccatgatggcttacgatgagtactacgcatctttcaaggttccagattggcagaaagccagtccaaacgccaaccagcgtagacttgtgcagaaagtggcagacgctaccgggtaccacttcaagtctgcgccgctgctccagagtgcattcacacacccttcttacgcgtattcagggaacgttccaaactatcaacgcctcgagtttctaggcgatgccctcatcgacatgaccatcgtcgaatatctctatcgcaactttcccctcgcagaccctcagtggttgacggagcacaagatggcaatggcctcgaaccaatttctcggttgtctgtgtgttaagctcaatctgcaccaccatcttctgttcaacacgtcgcagttcatcagcaaaattcgtgactatgtggccgaacttgagttggctgaagagactgcgcgccaagaggcagaagaagacgggactccaatgcgcatggacttttggctcaatgcgacaacgcctccaaaagcgtacgcagattcaatcgaggctcttatgggggccatgtttgtggattctgaattcgactattctgttgttgaggatttctttaccaagttcatcttcccgtactttaaagacatgtctctgtacgatacctttgcaaacaagcatccttacacatttctcaccaagaagatgcaacaggagatcgggtgcatgaaattctgtatgatttcagacacccgcgttcctgatgcagagcgtggcatggaagttatgaaagagtacgacatatattcagcctttcaagtgcacgaaagagtcatcacatgtcacgtatcaaagagtggaaggtacggtaagattgctgctgcaaagggggcactcgagttgttggagccgtatggcggtgatgtggtcgcgatgaagaagctgttgggctgcgactgcgactctgtaacagcagccatggcggagatggaccatggaacagctgtctaa

SEQ ID NO: 334 - DNA, 4356 bp, Fusarium graminearum
  source 1..4356: mol_type = genomic DNA
atgtcctcaagcgataaggtcatggcggacgcctcttccataccagactccgaggtcaaaacaatagcgtcgtcctcggtcgtcgagatctctgctacaggcgagaaggagataacgactcatatacctgtcgcagatacaccaatgtgctcagatgaccaggccaatgtgcaagagcaagacgaagaagttaagcctcagaaagtgacgcccaatccagaggtggtaaatccccgcggttaccagcgagagatgctggaacaaagcatcaaaaggaatgtcatcgttgcaatggacacgggaagtggtaaaactcaagtggccgtgatgcgcatccaacatgaactcgatacatgtgcaccagacaagattatctggttcttaggcaagacagtatcgctatgtgaacagcaatacagcgttgtccaaaggcaaatgccgtcggtatcgatgaaactgctaacggggcaattgaacatcgatgcatggtccgaggacgtctggccccgtatccttaatgggactcgtatcattgtctcgacctttgatatcctgcgagatgctttggaccatgcatttgtcaagatgaacatgctgtcccttatcgtcttcgatgaagttcataattgtgtaaagaatagctctggtcgaaaggttatggtgaatttctatcacgaacacaagaacgccggcatgcccgtgcctgctatcctgggtttaacagccagcccgatacagtcgaagtcaatccacgacgaaatccttgagctcgaggtcaccatggatgctgtatgcatcactccaacaattaaccggaaagaactcctccagcacgtcaacaagcccaatctttcccgagtattgtatgatgtggaagagcatccgactcgaacccccctaatgcagactctgcagtctgagtactcggcgatggacatcacccaggacccaagtattataaaggccaagcaacttatcgctaagggcgagaagactggacctgaaatactaagtatgttgatgaaacacaggaccttctctcagaagcagttaaagtccttatggaacaaaagcaaagacattcttgatgaactcgggccttgggctgctgacaagtacatctccgagttggtcagtctgtttctcaagagaatcgactcgccaatgacgtttaacgagtcctggagcaatgaggataggacctacctcgcaggtcatttgagacagatcgctgccagtccccatcagcccaaactaccagacagacacaacttggccgacaagacgaataaactaatccaggaactacttgcagcggatgaagatgtggtcggcattatattcgtcagatcaagggctgctgccaacgtcctttgtgctcttttgagggagcaccccgagattcgacagcgatatcgagtcggctctgtagtaggatccgcagccaccaagattcgaaagcaaaacatctacgagtatctgcccggcgcgactgccgatacattacgcgatttcaaaacaggcgccatcaaccttttggtctcgactagtgttcttgaagagggtattgatgtcgcagtgtgcaacctcgtcatatgtttcgatgagacaacgacactcaagtcccatatccaacgccgcggacgagctcgcaaacaaaaatcaaagatgatagtacttgctagatcttcatccgacgctcgggaatgggattccctagaaagagacatgaagagtcgttatgagcaggaaaggggagagttggacgctttagagatagaggctcgcactgaagcgacgtcctctttttcttatactgtgaaaaactcaggggctagattggacctcgagaattctcgccagcatctggaacatttttgtaacaaggttttccagcgagattacgttgatccgagacccgtctacattttccacaagaccgaactgggatcagcaccgccgactttcagcgcaacggtgactcttccctcgggtctgcctaagcacctccgaaggtgccaaggtggaggtggatggagatcagaaaagaatgcgatgaaggaagcggcttttcgtgcattcgtcatgctgcaccaagaaggtttggttagcgaccaccttcttcccctaaatgcagattcgaaagaagcagaagaagaggtgcagctaactgcgcccgagcttctatttgacccatggaaagacattgcacagcggtgggagaccacggctgagaaatggctctatgcttacgagttcgccgatcacgagtatgttactcctcttcatttcgagattgccttgcctgtgtgtcttccacgaccccgcgacatcacctttcatcctgaagagggacttaaatggcatgtcaaatgcacctcaatcaagaggatctccaatgatgaatgcttgggcttgccagatcatacgtcaaccctattggcgatgcattatggccaccgctggaacgtggaagatcgtgaccatgtgatcaaattcatatatgagaacaagaatctcacccgagatcaaattggatcggtacccttcggcgaaagcattgatgctctattggaaaagagagtcctggttcgggaccccaaaaatactcccttccactacgtcaaaatgatcccatcaaagcctccaaaagagcaagttcagcacccatttaatgaatacgaggaagcgccagaagaacagtatctagttgtggatcaatggacacgcaggtcggacctgttgcatgagataaaacccggtcaggggaagagctcttgcaccaaaccctaccgctgggttctcccgatttccagagcgactgttgatgaggttcctcggcgtgccgctaagtgcggtatgcttatcccttccatcattcacgaattggaggttcagctcatcgcgaatgaactgtcctcgacacttttggcgccagttggtatcacagatctgcaattggtgattgaagccatcagctcgcgtagcgctgcagagcctgttgactatgaacgtattgaatttttgggcgattcggttttgaagtattgcactgttattcaagcctactctgaacatcccttttggcccgaaggtctactcaaccatttcaaagaccgactagtctccaatacccgtttgactcgcatgtgccttgagacaggcctttccaagttcattttttccaaaacatttactggaatcaagtggagaccgctatatcgagacgaattcctagataagaagccagtcgatggtgtatcaaggtttgttggtccaaagactcttgctgatgtggtcgaggcacttgttggagcctcctaccaggatggaggaatcagcaaagctctggagtgcatcaaggttttcttgggcaccaagtgcaattggcatgatgacaaagtcgccagagacatactcttccgagcagcaattagcgacgtaccgttgccccccacgatggagcctttggaagagctcatcgggtacacatttcagaagaagtctctactcattgaggcaatgactcacgggtcgtatgcggctgatgggcagcagcgatcttatgaacaactcgagtttcttggagatgcggttcttgactacattgtcgtaacccgaatgttccaatctgaccccccagtgcccaatggacgcttacacatggtcaagactgccatggccaacgctgatttccttgcttttacaaacatgcaacatggactacgccggcctgaagttgaaataaatgagaacggcgaaccagtgcctacagaagtttcactgccgatatggaaattcatgcgtcatagctctccagagatgggtagaatcatgaatgagacccaggcccgatttgagagccttcaagaggaaatcaatgaggctaggacgaatggtaaacactacccctggacacttctcgctcgtcttcacccgaagaagttctactccgatattttcgaggctaccctaggtgccatttgggttgattcaggagatatcgaagtatgcacagcctttcttcacaagttcggcgtcttgccgtatcttgaccgaattctcagcgataatattcatgttcaacatcctaaagaggaactcgccaaactagcaatcgaccagaaaatgacgtatgattatacggctgttgatgggcctataaaggagtacctctgcacggccaaggttggagatcgcgtcgtgggagtcgtgtcaggggcactcaataaggctgaggcaatgaccaaggctgccgaagagggcgtgaattttttgaatggggagcagaaacgtgcagagaaggcggctcaggatgaaatggcgcgatttcttgttgccatggaactcatttag

SEQ ID NO: 335 - DNA, 156 bp, Verticillium nonalfalfae
  source 1..156: mol_type = genomic DNA
tcatgaccacagtcatgagttctcaccgaatgaagacccagggtcactgatcgactggagccatctgctgtcgaccaaagaggttgagtacttgccttgggatgaagatcacagtcccagcttctatcaaagcaagtttgtgattgatccatacac

SEQ ID NO: 336 - DNA, 156 bp, Verticillium nonalfalfae
  source 1..156: mol_type = genomic DNA
agaaggtcaacgatctactgccacaggcgacaaacaagaagccatatgctagggtttatccggcaccgtgggcgaaagtcgacacgattccattagatcatgcttactttggggcgttgatccctttcatttcacacattgtcgaggttcgactgg

SEQ ID NO: 337 - DNA, 2877 bp, Verticillium nonalfalfae
  source 1..2877: mol_type = genomic DNA
atgcccggcatcgctcgcaaggtcgtcatttgcgcggcgatcgacggcctcatcgtacagcctctgtcctccaaagggcagcgccctgcgcagcccgtccgcattggatatggtgacggtgccatttccccagcgccgcgggatcaactccctgatctcaccaagcccaacgcctcgttcgaggcttttggtgttgtgggcctgattaccctttcaaaactgaatttcctcattacaattacccgtcgacaccaggtcgctcaaattctaggatttcctatctacgttgtcaccgaggttgcgattacaccatgcgcctctcgccaggaagccgaggatgccgttcttcggacctccgtgcagctgcagacccgtactgatgatacggacacagaggattcggacagcgatagtaccatcgagttaatggcccacgctgtcgatgaggtcgacgatcagacgcagtcagagggctccatctcagcaggcgttaagagcaccgtcgccgaagacgtcatgagtcgtaaggggggctatggtcgattcgcccagcgctggttcagcagctccggctggatgcagggccagaaacgcaacgctggctggagctacacgacgaccgagttgcctcgagcttcgatggaccagcgcccggacctggagcccccggcggcatcgaaggtgcctctggaagaagaggacgacagagtcaacgaagcaaaggcgtcttctctgcttcccaaattgctccgaactgcgcaaattctttacgggtcatctaggagcttcttcttctcgtacgacgtagacataaccaggcactgggcgactcgagcacaatctccatctggtgagctgccactataccgtcgcgtcgaacctacattcttctggaaccgaaatacttctcagccattcattgattccggaaacgatgcgctagttctcccactcatgcagggattcgtcgggcagagggagtttaccatggataagagcccaccgcagcatgacgaagacgcgaataacgcactggaaatgtcaaacatgtctgctccaacatctccgccagggtcgccccctacagaagcgattcgcggctccctggatctccggggctcggaaaagaagttcctgattacggtgatttctcggcggtccattaagagagccggcctccgatatttgcgccgcggtattgatgaggatggccatgtggccaacgctgttgagacggagcaaattctgtctaactcttcgtgggatcagagctctaaaatttactcgttcctgcaaattcgcggcagtatacccctattcttcacccagagcccgtactcattgaaacctgcaccagtcatacaacactccacagaggcaaactttgaagcctctaagaagcacttcgagcgccttcaccgagaatatggtatgctgcaagtggtcagcttggtggaaaaacacaatgttgaggctacaatcggcaacgaataccagcatactgtcgcgaagctaaacgaaaccgtcttcagcgatcatacttctcaagtcccgttcgaatggtttgatttccacgcagcctgtcgtgggatgaagttcgaaaacgtcagcctccttctggatgccatgaggaccaagcttgatgagcttgggagcactgtcgaaaaggatggagagctgttccttcgccaacgtggagtgcttcggacaaattgcatggactgtctcgaccggacaaatgtttgccagagctcatttgcaaagtatatgctggaatcacagctcaaggctgagggatacgatctgagcatgcaagtagaccagcaatctgcatggttcaacacgctgtgggcggacaacggagactccgtgtcgaagcagtacgcttctacggcagccatgaaaggcgactacacacggtacaagactcggaactacagaggaatgctcaatgatcttggcttctcattgacaagattttataacggcatggttaatgactatttcagtcaagctgccattgacttcctccttggcaacgtcacttccatggtctttcaagagttcgaagctgaaatgatgacgaaagatcccgccatgtcgatgctcaagatgcgtgaatcagctatcgaattatgccagaaacgcgtcatctcagaccaaaaagaggactttgttggcggatgggtcatgctgagccctccaacgtctgacgttgtcaagtcacagacacccttcgaagaagtgattctccttctcacagatgctgccctttatctctgtcgctttgactggaagcttgacaaggtatcgtcgttcgaacgcgtcgacctcgcgcatatcgtgggtatccgcttcggcacttatattacatccacagtttcgcctggtcacaccgacgagagtaaaaacattgggttcgtggtgtcataccagcctggaaagactgacatccaacgcacaaatactcgtacgctttcgagcaactttatcaaacaacctggtcaggtcgaagaagagtcattggccgcggtggcggtcgacgagcctgcggcgctctcggggctgatgggactgctgtccggtcatcgacccaaaccccaaacaccgactcgaaagctcgccttcaaggcgccgtattcgcagtcgtcggccgcggtgacgggtgaggggccacgcttgagcgagacacagcaggttgtgagtatctgtgctgatgtcgagagactggccttcaaagcgcagcctggaaaggacgtgcctggaaccaagagcatcatcgagaggggtgacatcatctcattggaggacgcacaagcaaacacgacgattttagaccagctgagccactctatcaagaggcttgtttgggcgtag

SEQ ID NO: 338 - DNA, 4014 bp, Verticillium dahliae
  source 1..4014: mol_type = genomic DNA
atgtcagatctagcagtcggtcagatcgtccagctgaccgacggccgcaatggcgtcgtacgcttcgccggcaccacccatttcgcctcgggcgaatgggtcggcattgaattggaggatgactctggaaagaacgacggcagcgtccagggcgagcgctactttgactgttccatggggcgaggcatgtttgtgcggccgtcgaccctgaccattctcgcccaggctccagctccagctgcggcgccggccgccagacctaccgtcaggaagacgagcaggcccagcagcttcgtgcccggcacgggcagggtgtcgagcgtcaccgacccgagcatggccaagcggatgagtctgaatgctgctagtcccagcccggccccgcgcacatctcgacctgcgagccttgtacggtctcctacgaagtcgccaacgaagcaaattggttcgaccacctccagcaccgcaccctcccggaccggcacaccttcaaacgccaaaggcaccaccgccacgcgaactcgcccggcagtaggtgttcgcacctccatgggaccccctccgattccctccgcacgagtgagccgacagccatcaacatcgtcagcgacaggtcgccctcccgccaggccgctttccaatcgactctccctgtccggctcgcgcagcgtgcccaagccagaccccctccgacgcccatcgaccgattcgcaagcaggcagggagcccggctcggcagcagacagcggcgacgacggcaggagcagctcgccatctaagggagcggctgatctggcctcaccgcatgccacgagcccggtgcaagctcggaccaacgcgctcgagcggttgacctcgggcaggacggcgaccacgacggcacggtcgccagccacggcgtcgcctcgaacggccggcggcaacacggctgcggcgcgggagaacgaagacctcaaggcgaagctccgtgtcatggagcgcaagaggctggaagaccgggagaagctgaagcagctggagaagctccaaggcgaacgcgacaagtttgagtcgatcatccagaagctgcagacaaagtaccaaccccagcaaacggagaatgcagagctccgcaagcagatcaaggaggccgagacgcggttcgaggccgtggagcagatgcaggccgagcatgagacggccttggagctggccacgctggaccgtgagatggcggaagagacggccgaagtgctcaaggccgagctcgaagcgttgaagcagaaatcagaggagcttgagctcgaggtggaaatcttgcgagaggagaacgaggagtttagccagggcatgacgcccgaagagcggtcaagcacgggctggctgcagatggagaggacgaacgagcggttgagggaagcactgatacgattgcgcgacctgacccaggctcaagaggccgagcttcgagaccagatcaaggccctggagtctgacctgcaagactacagtaccgtgcaggagcagttcgcggcctccaaggaaaagctggcacagtctgaaagcgcggtcgaggatcttcgccaacagctcgacaatgctcttggagcggaggacatgattgaggacctcaccgagcgcaacatgagcatggccgaagagattgaggagctcaaggccgtcatcgaggatctcgaaaacctcaaggagatcaatgatgagctcgagattaatcacgtacaaaacgagaaggagatgcaggaggaactcgacttcaaggacagcgtcattgcggaacaggcccgacgagccggtcagcaagaggaagccctcgaagacatggagtacaccctttcgaggttcagggaactcgtcacgagcctgcagggcgaccttgaggacatgcgcgcatcgcacgctgtcaccgaggccgagtcggagcaattagacagcaagtcccgcgccatgatggacctcaacatgaagctccagatctcggctgccaagacacaggtcaagacgatcgacctggagcttcgccgtctggaggcgcaagaagcggagcagcacctcgaaatcgtcaagctcttcttgcccgagacctaccaggaggaccgcgactccgtgttggcgctccttcgcttcaagcgactggcgttcaaggccactctgctccagggcttcctcaaggaacgcgtcacgggccagccgcaccccggccacgaggacgacatgtttgccggctgcgatgccattgacaagctcacctgggtggcggccatgtgcggccgcttcatcaacgccatcagccactgctcgatcgagcagttccagcactaccagggcgctctgtttgagctggagccggtggagcgggcggtgaacgggtggatcgacggcctcaggagggatgaactcaaggaggccaagtgcgccagcgagctgcagcgctccattgcgctcatgacccatctcgccgaggttcaccttacggacgatctgcagagcttcgccgacgccatgcacatgcgcgctctcgtcgtgcaaagccatctggattcggccgccgcggccattacgaccgccagggccatggtccagagagtcatccccgagtctggcgaggacgacgagatggcacagcacttcagcaagaaggccgagcacgttgtcggccagacccgcagcaccaaggtcattgccagcaaggccgtgcgcgccctcgaggatctcaagaaccgatctctctcgctggctcgggacgacagcacgcaagaggcgtttgagcagtgcgaagaggccgcaaaggacctcgccgcactggcgcggcagattggcctcgacttgcacaagctgctgcacgaggagggcaggaccgagccatacacgcacacggaggtgcagaacacgatggcgcagacggccctgtcggccggttcgtcgaccgactcggatctcttctcgacctacgtgaccaagctccgggtcgtcacgcagcagatcacggaccttgcgggcctcagctctgacctgacgcagacgcaagagtttgagctcaacccggccccctggaagctccgctctcaagaactcaaggctctcaagacgatccccgtggatgccgaagaggagctccgccgcgtcaaggaggagcacaacgaggcgcgccgcacgattgcgcagcgcgacgagagcctcagcacggcgacgctcaagattgagacgctcgagtcccgcatgcgcgacgcgcaccaaaaggcgtcgcgcatcgccgaccttgaggcccagatcgagacggccaagcagcgcgcggcggcgctcaaggaggacattgaaaagggcgaccgcgagctcaaggcgctcgaggcggaccgcgaccagtggaagaagattgcgggcgacagcaaggcgttcgccggcgccaacgacgctggcgccgccaagtcgggccaggaacgggccgtggcgacggcgcgcgagatggacgccctcaaggccgacattgcgcacctgcaggcggcggtgcggtacctgcgcgaggacaaccggcgggcgcggctcacggagcaggccgactacgactggctcgcggcgccgctgcgcaaggcggcgtcgccggccgagcagcggcgcgcgctcgtcgtggccgagggccgcgacgcgctcggcgagctcgtgcggttcgcgacccaggccaaggtgtacgacctccaggacctgccgcaggacaagctcgcgtggcggccggccaagagcacgccgcagtaccacgccgcgcggcaggcggaggacctcgcggcctggaagggctggcgcgactcggtggtgcagaagacggaggtcgtcgccgggcgcaggggcggtggtgctccggacatgaagagggtcgaggcgctgcggcggagcgcggcggctgcgcgactgcagattcggctgccggggcccgacggcaagatggcgcggggcagcggacgggatgtgcagattgtcggatcgagggagtgggagggtctgcaggggcggttggccgtgtaa

SEQ ID NO: 339 - DNA, 1089 bp, Rhizoctonia solani
  source 1..1089: mol_type = genomic DNA
atgcgctccactgctactactttctcccttctctctttggctcctgccctgtttgcatccccagttgagcgttgtacaggtaccatatcatctttagatgatgttgccaatgcaatcaaatgtactactatcaatatcaactcgttcacagtacccgctggaaagactttccaactggatgcccccagtggcgctacagtcaacctattgggagacgttacgtttggcgtctctgcatgggcgggaccactattccaattgaccggaacaagcatcactttcaacggcaatggacataccttcaacggccaaggcgaacaatactgggacggtcttggaagcagtggaacgactaagcctcaccccatgatgaaaatcaaatcgtccggaacgttctcgaacgttgtagttaaaaactccccacagcaatgctttagcttcggcaacagcgcagctctgactgtttccaaggtcacagtcgacaattctgcaggagatgctgcgaacagcaagagtggtggtaaagctgctggtcataacacggacgggtttgatgtctcggtttccaatctcactatcgaagactccaccgtgcacaatcaagatgattgtctcgcaattaataaaggctccaacattattttccagcgtaacacatgcaccggtggacatgggatctcggtgggctctatcgactcggatgtcacagtcagtggcgtacagatccttaataatgtggtcacgaacaacgacaatggtcttcgcatcaagaccaaggctgctgccactggctccactgtatctggcattacctacaccggcaacaccgtcactggttgcaaaaagtacggtgtcatcattgaccagagttacccagatacccttggtactcctgggactggcgtcaaaatttctggcgtgaccttcagtggtaccaacaccgtttccgtcgttagtggagccaaggaggtcgaagtcaactgcggctcaggttcttgcacaggaacttggaattggtcgggtctcaaggtttctggtggatccgcgggggccatcaattactctggtatcaccggtttctcgctttaa

SEQ ID NO: 340 - DNA, 169 bp, Botrytis cinerea
  source 1..169: mol_type = genomic DNA
ttcgttccaggagttacacgcaaagatcacttcactggtggaccagcaaaaagatagtaaacatatcgggaaaatatcgatatatattctccgaattctacgagatatcagagcagaattacctagtaaccctgcactacaaaagtttggactctcacttgtctcatca

SEQ ID NO: 341 - DNA, 179 bp, Botrytis cinerea
  source 1..179: mol_type = genomic DNA
ttcgtgctctcgtcgaaagcaaagacaataaagaagaacaaatggagcgcgagttggagggattgcgaagaggaagtgttagcaatcctactacgcatcgtactagtgccatgagcagcggaactgtgactcaggataggaattctctccaagacaataagagcacagttgtaagctgg

SEQ ID NO: 342 - DNA, 168 bp, Botrytis cinerea
  source 1..168: mol_type = genomic DNA
acgttgttcaaagtgcagtggcaaagcgagcacttgaaatgcagttaaagaatgagggactagatgtcactctacaaattgatcaaactcaacaatggttcaatactttgtgggccgacaatggtgacgccatttctaagcaatacgcttctacagcagcattgaagg

SEQ ID NO: 343 - DNA, 259 bp, Sclerotinia sclerotiorum; identical to SEQ ID NO: 312
  source 1..259: mol_type = genomic DNA

SEQ ID NO: 344 - DNA, 200 bp, Sclerotinia sclerotiorum; identical to SEQ ID NO: 313
  source 1..200: mol_type = genomic DNA

SEQ ID NO: 345 - DNA, 230 bp, Sclerotinia sclerotiorum
  source 1..230: mol_type = genomic DNA
gcattggctgcgctgaagacgaaacctttattgaaagatgaaagtattcgagatttggagggattgagattagatgtatgtgagcggtggtttggtgatgaaattctttactttacaccttatgttcgacacgatgatttggaaggatcattagccgttgagacattaagaggttgggcgaagaaagcatcagaggtactactggaaggattcacaaagactcttcaagg

SEQ ID NO: 346 - DNA, 196 bp, Sclerotinia sclerotiorum
  source 1..196: mol_type = genomic DNA
tcaatgccagagattgacggttactcttcagcagcggaggatttctgtgaattgtgcgaggcatcaggtcatgatgttctacattgccccatgttcggtcctaatggtaatagtggcaactctagagaggagtctcctaaagagcaacgaacaggaaaagacgttgtcatggaaggactcaaactatcacccaaac

SEQ ID NO: 347 - DNA, 194 bp, Sclerotinia sclerotiorum
  source 1..194: mol_type = genomic DNA
gcttacatttccaagcaggaaatcaatggccgcttgactgaaataatcattaacaataccgctgtaaaatctagagatagaaagtcccatgtctgtcaaagcacccttgtaatcacgctttctagtacgagtgaagtctcccttcagggctgctgtagaggcatattgcttagagatagcatcgccattatcag

SEQ ID NO: 348 - DNA, 753 bp, Fusarium oxysporum
  source 1..753: mol_type = genomic DNA
atggagacggatatgcaccgagtcatccgcacccaggacctttctgacgaccactgccagtacttcatctaccagaccctccgcgccctcaaggccatgcactcagccaacgtgctgcaccgagacttgaagccctccaacctcctcctcaacgccaactgtgatctcaaggtttgcgattttggtcttgcgcgatccgctgcttcccaggaggacaactccggtttcatgactgaatacgtcgcgactcgatggtaccgtgcgcccgagatcatgttgactttcaaggagtacaccaaggctattgatgtgtggtcggttggctgcattctcgccgagatgctcagcggcaagcctcttttccctggcaaggactaccaccaccagttgacactcattctggatgtgctgggcacgccgactatggaggattactacggaatcaagtcgcgccgcgctagagaatacattcgatcgctccccttcaagaagaaggttcccttccgaactctattccccaagacctcggatctggccctcgacctgctcgagaagctcctcgcattcaaccctgttaagcgcattaccgtggaggaagctctgaagcacccataccttgagccttaccacgatcccgaggatgagccaacagcgcccccgatccctgaggagttctttgactttgacaagcacaaagacaacctgagcaaggagcagctgaagcagttgatctaccaggagattatgaggtaa

SEQ ID NO: 349 - DNA, 1074 bp, Fusarium oxysporum
  source 1..1074: mol_type = genomic DNA
atggccgagttcgtacgcgcccagatctttggcaccacattcgagatcacctcgagatactccgatctccagcctgttggcatgggagcttttggcctcgtttgctctgcccgggatcaacttaccaaccaaaatgtcgcagtcaagaagatcatgaagcctttcagcacacctgtgctcgcaaagcgcacataccgtgagctcaagctgctcaagcacctcaagcacgaaaacgtcatttctctcagcgacatctttatttctcctttggaagatatctattttgtcacagagctcctcggtaccgatcttcaccgattattgacatcgcgccctcttgagaagcagttcatccagtacttcctctaccaaattatgcgaggtctgaagtacgtgcattcggccggcgttgtccaccgcgatctcaaacccagcaatatcctcgtcaacgaaaactgtgatctcaagatttgcgactttggtcttgcacgaatccaggaccctcagatgactggttatgtctccacacgatactaccgagcccctgaaattatgctcacctggcaaaaatacgacgtcgaggttgatatttggagtgccggttgcatttttgctgagatgcttgagggcaaacctttgttccccggaaaagatcacgtcaaccaattctctatcatcactgagctacttggtacccctcctgatgatgttatcaacaccatcgccagcgagaacacactgcggttcgtgaagtcgctgcccaaacgcgagcgacagcctcttcgtaacaagttcaagaatgccgacgattcggctattgatctgctggagcgcatgcttgtcttcgaccctaagaagcgaataactgccacagaggccctgtcccacgactatctctctccctaccacgaccccacagacgagcccgtggcggaggagaagtttgactggagcttcaacgacgccgatctccccgttgatacatggaaaatcatgatgtactcggaaattctcgattatcataacgtggaagccggagttactaacatggaggagcaattcaacggacaataa

SEQ ID NO: 350 - DNA, 1965 bp, Fusarium oxysporum
  source 1..1965: mol_type = genomic DNA
atgtctgcctccgactcgatcccggcccccccggaggactggaaggatctgtcgacacctgcatctccaggctctgaagattcgtcagaacccagtacgccgctcgaatctcccggtcatgatagccccagtgagcctcctcgaagagtaccatctctgcgctccgtttccgatcctcgcaacatgaatccgaactcaactgctatgggtgttttaggcatggccagacgccctgtacaaacatcctcgagttttgctggaagtagtagtgcctcggtggaaaacagtataatggccaaagcccgagcattacatcaacaacgcatgcagaagggcatgtctcccgctggaatccccggaacaccctcggggtcatcacctacggccagcgtcgctaacggattccctaccaatctgggattgccgcccaatatgcaacgaccgcacgcaccacatgtaaattcagctcctgcgataacgaagccctcgctgagtgagagaagggccatgggcggcggcatgggcatgaagctgtctgatatgggtagacccagccctgtcaccgccactgggaagaaacgggggcctcctggaaagctttctgatatcacaggtgatgcgccaggtagtcaacaatccaacggaacagggggtgggcaggggtcaaaaatggacgatttcaagaaatatattgacacagagaagggttgggtgacctttgatggcgctgccacaatcacacggacaggtgtcaactttgccaatggccaaaccttcagcatatctcttgatgaagttgaagtcttgaccgagctgggtaaaggaaactacggaacagtctacaaggtcaagcatgccaagcgaagagtccctcgcttcggacaaggcctctcgagaaagccccttcctgttcagtattcgcagtcggacccttctcccattggatctgcggaagactccgccgagggcttgccagacacgaccgacggtacaacgggcacagtaatggcgatgaaagaaatgcgcctggagctcgacgacgccaaattcacaaccattctgaaggagctcgtcatcttacacgagtgtgtttctccgtatatcatcgacttttacggcgccttcttccaggaaggtgctgtttacatgtgtattgagtatatggatggcggatctatcgataagctgtataatggtggtatcccggagaatgttcttcgaaaaatcacatactctaccgtgatgggtctcaaatcactgaaggaggagcatagcattattcatcgcgatgtcaaaccaacaaacatcttggtcaatacacgaggccaggtcaagatttgcgattttggtgtcagtggtaatctggtagctagtatagcgcgaaccaacatcggctgtcagagctatatggcccccgagagaatctctggtggtggattcgcacaagccggtaattccgatggctcatacagcgttcagagcgatgtctggagtttgggcctgaccatcatcgagtgtgctaagggcgcttatccttacccaccggaggtctcttctactattttcagccaactgagtgctattgttgaaggtgaaccacctgctatgccagaggacacttactcggacatggccaaggattttgtgaaaagctgtcttcacaagattcctatgaagcggccaacctacgccatgctattgaaacatccgtggctcgtcgaatttacaaagcctcaaacaatcacggaagaagctgaggagggtgatggagttgatacggtcgcggaagctgttggtaaaattgatttgagctcatcaactgcagatactgaagtggcagattgggtcaatggcgttctacaacgagagaaagatggcctgaaggaggacgggcccttgaaaccagcactacacaatgcaccgcttgatagcgtcagtcctatgtcaagcccaaaggatgcatga

SEQ ID NO: 351 - DNA, 108 bp, Medicago truncatula
  source 1..108: mol_type = genomic DNA
gcnttyathcarytnwsnaarccntgyathwsngayaargartgywsnathgtnaaraaytaymgngcnmgntgymgnaarggntaytgygtnmgnmgnmgnathmgn

SEQ ID NO: 352 - DNA, 120 bp, Fagopyrum esculentum
  source 1..120: mol_type = genomic DNA
gcncartgyggngcncarggnggnggngcnacntgyccnggnggnytntgytgywsncartggggntggtgyggnwsnacnccnaartaytgyggngcnggntgycarwsnaaytgyaar

SEQ ID NO: 353 - DNA, 120 bp, Fagopyrum esculentum
  source 1..120: mol_type = genomic DNA
gcncartgyggngcncarggnggnggngcnacntgyccnggnggnytntgytgywsncartggggntggtgyggnwsnacnccnaartaytgyggngcnggntgycarwsnaaytgymgn

SEQ ID NO: 354 - DNA, 558 bp, Capsicum annuum
  source 1..558: mol_type = genomic DNA
atgatgaaygcnaayggnttywsnggngtngaraargartayathmgnaarcaycayytncaycarccnaargaraaycartgywsnwsnttyytngtnaarcayathmgngcnccngtncayytngtntggwsnytngtnmgnmgnttygaycarccncaraartayaarccnttygtnwsnmgntgyathgcncarggngayytngarathggnwsnytnmgngargtngaygtnaarwsnggnytnccngcnacnacnwsnacngarmgnytngarytnytngaygaygargarcayathytnwsnttymgnathathggnggngaycaymgnytnmgnaaytaywsnwsnathathwsnytncayccngargtnathgayggnmgnccnggnacnytngtnathgarwsnttygtngtngaygtnccncarggnaayacnaargaygaracntgytayttygtngargcnytnathaaytgyaayytnaarwsnytngcngaygtnwsngarmgnytngcngtncargaymgnacngarccnathgaycargtn

SEQ ID NO: 355 - DNA, 981 bp, Phaseolus vulgaris
  source 1..981: mol_type = genomic DNA
atgaaraaraaymgnatgatgathatgathtgywsngtnggngtngtntggatgytnytngtnggnggnwsntayggngarcartgyggnmgncargcnggnggngcnytntgyccnggnggnaaytgytgywsncarttyggntggtgyggnwsnacnacngaytaytgyggnaargaytgycarwsncartgyggnggnccnwsnccngcnccnacngayytnwsngcnytnathwsnmgnwsnacnttygaycargtnytnaarcaymgnaaygayggngcntgyccngcnaarggnttytayacntaygaygcnttyathgcngcngcnaargcntayccnwsnttyggnaayacnggngayacngcnacnmgnaarmgngarathgcngcnttyytnggncaracnwsncaygaracnacnggnggntgggcnacngcnccngayggnccntaygcntggggntaytgyttygtnmgngarmgnaayccnwsngcntaytgywsngcnacnccncarttyccntgygcnccnggncarcartaytayggnmgnggnccnathcarathwsntggaaytayaaytayggncartgyggnmgngcnathggngtngayytnytnaayaarccngayytngtngcnacngaywsngtnathwsnttyaarwsngcnytntggttytggatgacngcncarwsnccnaarccnwsnwsncaygaygtnathacnwsnmgntggacnccnwsnwsngcngaygtngcngcnmgnmgnytnccnggntayggnacngtnacnaayathathaayggnggnytngartgyggnmgnggncargaywsnmgngtncargaymgnathggnttyttyaarmgntaytgygayytnytnggngtnggntayggnaayaayytngaytgytaywsncaracnccnttyggnaaywsnytnttyytnwsngayytngtnacnwsncar

SEQ ID NO: 356 - DNA, 1020 bp, Oryza sativa
  source 1..1020: mol_type = genomic DNA
atgwsnacnccnmgngcngcngcnwsnytngcnaaraargcngcnytngtngcnytngcngtnytngcngcngcnytngcnacngcngcnmgngcngarcartgyggngcncargcnggnggngcnmgntgyccnaaytgyytntgytgywsnmgntggggntggtgyggnacnacnwsngayttytgyggngayggntgycarwsncartgywsnggntgyggnccnacnccnacnccnacnccnccnwsnccnwsngayggngtnggnwsnathgtnccnmgngayytnttygarmgnytnytnytncaymgnaaygayggngcntgyccngcnmgnggnttytayacntaygargcnttyytngcngcngcngcngcnttyccngcnttyggnggnacnggnaayacngaracnmgnaarmgngargtngcngcnttyytnggncaracnwsncaygaracnacnggnggntggccnacngcnccngayggnccnttywsntggggntaytgyttyaarcargarcaraayccnccnwsngaytaytgycarccnwsnccngartggccntgygcnccnggnmgnaartaytayggnmgnggnccnathcarytnwsnttyaayttyaaytayggnccngcnggnmgngcnathggngtngayytnytnwsnaayccngayytngtngcnacngaygcnacngtnwsnttyaaracngcnytntggttytggatgacnccncarggnaayaarccnwsnwsncaygaygtnathacnggnmgntgggcnccnwsnccngcngaygcngcngcnggnmgngcnccnggntayggngtnathacnaayathgtnaayggnggnytngartgyggncayggnccngaygaymgngtngcnaaymgnathggnttytaycarmgntaytgyggngcnttyggnathggnacnggnggnaayytngaytgytayaaycarmgnccnttyaaywsnggnwsnwsngtnggnytngcngarcar

SEQ ID NO: 357 - DNA, 759 bp, Solanum chilense
  source 1..759: mol_type = genomic DNA
atgaarttyaayathgtnwsnccngtngcnytnwsntgyytnttyttyytnttyytnacnggnacnytngcncaraaygcnggnwsnathgtnacnmgngarytnttygarcaratgytnwsnttymgnaayaaygaygcntgyccngcnaarggnttytayacntaygaygcnttyathgcngcngcnaaywsnttyccnggnttyggnacnacnggngaygayacngcnmgnaaraargarathgcngcnttyttyggncaracnwsncaygaracnaarggnggnwsngcnggnacnttyacnggnggntaytgyttygtnmgncarathgaycarwsngaymgntaytayggnmgnggnccnathcarytnacncaycarwsnaaytaygarmgngcnggncarggnathggngtnggncargayytngtnaayaayccngayytngtngcnacngayccnathathwsnttymgnacngcnathtggttytggatgacngcncargayaayaarccnwsntgycayaaygtnathathggncartggacnccnwsnccngcngayacngcngcnaaymgngtnccnggntayggngtnathacnaayathathaayggnggnytngartgyaayatgggnccnaayacngcngtngarwsnmgnathggnttytaymgnmgntaytgyggnatgytnaaygtnccnacnggngaraayytngaytgyaayaaycaraaraayttygcncarggn

SEQ ID NO: 358 - DNA, 998 bp, Hordeum vulgare
  source 1..998: mol_type = genomic DNA
ctacgacagtagcgtaagcgtaacaccgagtacgtactctgtgctttgttggctcgcacaatgagatcgctcgcggtggtggtggccgtggtagccacggtggccatggccatcggcacggcgcgcggcagcgtgtcctccatcgtctcgcgcgcacagtttgaccgcatgcttctccaccgcaacgacggcgcctgccaggccaagggcttctacacctacgacgccttcgtcgccgccgcagccgccttcccgggcttcggcaccaccggcagcgccgacgcccagaagcgcgaggtggccgccttcctagcacagacctcccacgagaccaccggcgggtgggcgactgcaccggacggggccttcgcctggggctactgcttcaagcaggaacgtggcgcctcctccgactactgcaccccgagcgcacaatggccgtgcgcccccgggaagcgctactacggccgcgggccaatccagctctcccacaactacaactatggacctgccggccgggccatcggggtcgatctgctggccaacccggacctggtggccacggacgccactgtgggctttaagacggccatctggttctggatgacggcgcagccgcccaagccatcgagccatgctgtgatcgccggccagtggagcccgtcaggggctgaccgggccgcaggccgggtgcccgggtttggtgtgatcaccaacatcatcaacggcgggatcgagtgcggtcacgggcaggacagccgcgtcgccgatcgaatcgggttttacaagcgctactgtgacatcctcggcgttggctacggcaacaacctcgattgctacagccagagacccttcgcctaattaattagtcatgtattaatcttggccctccataaaatacaataagagcatcgtctcctatctacatgctgtaagatgtaactatggtaaccttttatggggaacataacaaaggcatctcgtatagatgctttgct

SEQ ID NO: 359 - DNA, 978 bp, Oryza sativa
  source 1..978: mol_type = genomic DNA
atgmgngcnytngcngtngtngcnatggtngcnacngcnttyytngcngcngcngtncaygcngarcartgyggnwsncargcnggnggngcngtntgyccnaaytgyytntgytgywsncarttyggntggtgyggnwsnacnwsngaytaytgyggngcnggntgycarwsncartgywsngcngcnggntgyggnggnggnggnccnacnccnccnwsnggnwsnggnggnwsnggngtngcnwsnathgtnwsnmgnwsnytnttygaycaratgytnytncaymgnaaygaygcngcntgyccngcnwsnaayttytayacntaygaygcnttygtngcngcngcnwsngcnttyccnggnttygcngcngcnggnggngaygcngayacnaayaarmgngargtngcngcnttyytngcncaracnwsncaygaracnacnggnggntgggcnacngcnccngayggnccntaygcntggggntaytgyttyaargargaraayggnggngcngcnggnccngaytaytgycarcarwsngcncartggccntgygcngcnggnaaraartaytayggnmgnggnccnathcarytnwsntayaayttyaaytayggnccngcnggncargcnathggngcngayytnytnggngayccngayytngtngcnwsngaygcnacngtnwsnttygayacngcnttytggttytggatgacnccncarwsnccnaarccnwsntgycaygcngtngcnacnggncartggacnccnwsngcngaygaycargcngcnggnmgngtnccnggntayggngtnathacnaayathathaayggnggnytngartgyggncayggngargaygaymgngtngcngaymgnathggnttytayaarmgntaytgygayathytnggngtnwsntaygaygcnaayytngaytgytaywsncarmgnccnttyggnwsn

SEQ ID NO: 360 - DNA, 1098 bp, Brassica juncea
  source 1..1098: mol_type = genomic DNA
aaataaaattcatcaaaataacccatccaaaagagtccaaaataacaaatgacaattccacctttattttaacaaaaattatattcaaactagacaaacatgataattgtgatatagtttctcaacaagtttcaaaaacaattatagttttccaccataattgtaaacacacatattttcgccaaaaccataaaatatatattctcgctaaaacaacaagaaaaacatttgtccgtgaattccatctcttctcataaacttcatcttccatcgtatcaagcgaacccatcctattggggggtatgtgattcatgagccttaattagggtggtacagtcagcgactcctgagcttcagagagggtagtccagcagctagtgactctgctagagatagtgtggcccagctagtgagtagtgactcatgaggtagagagagggtggtccatcatatatcgtgttagacaaattctatatagacaatgaggtaaatgtgggatatgaaggtggtggcaaattttagaacaattagtatttaagtatagtaaacataaaaacaaaccagcactgcttatcttcgattctatcaagcgaacccaccttatattgaattaatttatggtagcagtgattcgtgaacgtcagagagggtggtccctctagtgactcatgagctagagagagggtggtccagctatcgtgtagaaatattctatagaccattagataaacgtgccaaatgaacttggtggtgacaaaatagaagtttagaatgtttgggttcccggtaaaaaggtgaaaccacctttttttttttttttttttaccaacgttgaattggcctaatgataaaagggttacgcttgtaactaccgccacccaggtttaattcacggtgggagagactatttataatgcttaggtttctggcaaagaagtgaaaccactttttttctttccagaaaaaatagaagtctagaaaacataaaaacaagtatataaaattcgatgtgatttaacactaactgattttgtacattgcatgttgctatatatacccttacttgcctcttaaaacaaccatacagctcagagaaac

SEQ ID NO: 361 - protein, 36 aa, Medicago truncatula
AFIQLSKPCISDKECSIVKNYRARCRKGYCVRRRIR

SEQ ID NO: 362 - protein, 40 aa, Fagopyrum esculentum
AQCGAQGGGATCPGGLCCSQWGWCGSTPKYCGAGCQSNCK

SEQ ID NO: 363 - protein, 40 aa, Fagopyrum esculentum
AQCGAQGGGATCPGGLCCSQWGWCGSTPKYCGAGCQSNCR

SEQ ID NO: 364 - protein, 186 aa, Capsicum annuum
MMNANGFSGVEKEYIRKHHLHQPKENQCSSFLVKHIRAPVHLVWSLVRRFDQPQKYKPFVSRCIAQGDLEIGSLREVDVKSGLPATTSTERLELLDDEEHILSFRIIGGDHRLRNYSSIISLHPEVIDGRPGTLVIESFVVDVPQGNTKDETCYFVEALINCNLKSLADVSERLAVQDRTEPIDQV

SEQ ID NO: 365 - protein, 327 aa, Phaseolus vulgaris
MKKNRMMIMICSVGVVWMLLVGGSYGEQCGRQAGGALCPGGNCCSQFGWCGSTTDYCGKDCQSQCGGPSPAPTDLSALISRSTFDQVLKHRNDGACPAKGFYTYDAFIAAAKAYPSFGNTGDTATRKREIAAFLGQTSHETTGGWATAPDGPYAWGYCFVRERNPSAYCSATPQFPCAPGQQYYGRGPIQISWNYNYGQCGRAIGVDLLNKPDLVATDSVISFKSALWFWMTAQSPKPSSHDVITSRWTPSSADVAARRLPGYGTVTNIINGGLECGRGQDSRVQDRIGFFKRYCDLLGVGYGNNLDCYSQTPFGNSLFLSDLVTSQ

SEQ ID NO: 366 - protein, 340 aa, Oryza sativa
MSTPRAAASLAKKAALVALAVLAAALATAARAEQCGAQAGGARCPNCLCCSRWGWCGTTSDFCGDGCQSQCSGCGPTPTPTPPSPSDGVGSIVPRDLFERLLLHRNDGACPARGFYTYEAFLAAAAAFPAFGGTGNTETRKREVAAFLGQTSHETTGGWPTAPDGPFSWGYCFKQEQNPPSDYCQPSPEWPCAPGRKYYGRGPIQLSFNFNYGPAGRAIGVDLLSNPDLVATDATVSFKTALWFWMTPQGNKPSSHDVITGRWAPSPADAAAGRAPGYGVITNIVNGGLECGHGPDDRVANRIGFYQRYCGAFGIGTGGNLDCYNQRPFNSGSSVGLAEQ

SEQ ID NO: 367 - protein, 253 aa, Solanum chilense
MKFNIVSPVALSCLFFLFLTGTLAQNAGSIVTRELFEQMLSFRNNDACPAKGFYTYDAFIAAANSFPGFGTTGDDTARKKEIAAFFGQTSHETKGGSAGTFTGGYCFVRQIDQSDRYYGRGPIQLTHQSNYERAGQGIGVGQDLVNNPDLVATDPIISFRTAIWFWMTAQDNKPSCHNVIIGQWTPSPADTAANRVPGYGVITNIINGGLECNMGPNTAVESRIGFYRRYCGMLNVPTGENLDCNNQKNFAQG

SEQ ID NO: 368 - protein, 326 aa, Oryza sativa
MRALAVVAMVATAFLAAAVHAEQCGSQAGGAVCPNCLCCSQFGWCGSTSDYCGAGCQSQCSAAGCGGGGPTPPSGSGGSGVASIVSRSLFDQMLLHRNDAACPASNFYTYDAFVAAASAFPGFAAAGGDADTNKREVAAFLAQTSHETTGGWATAPDGPYAWGYCFKEENGGAAGPDYCQQSAQWPCAAGKKYYGRGPIQLSYNFNYGPAGQAIGADLLGDPDLVASDATVSFDTAFWFWMTPQSPKPSCHAVATGQWTPSADDQAAGRVPGYGVITNIINGGLECGHGEDDRVADRIGFYKRYCDILGVSYDANLDCYSQRPFGS

SEQ ID NO: 369 - protein, 135 aa, Arabidopsis thaliana
MEGKTVIFSVLVMGLVISQIQVEAQKTCCPSQSTRKEFEDCISEGNLQILCSAESGCRDTYVGYCPSGFPYGSLTNSGDVVNVYCKLGCVSSLCGALTSLQKLDTSGKVNVAVERCTKACSTICTKGSKTAVETV

SEQ ID NO: 370 - protein, 61 aa, Vigna mungo
PNPKVFFDMTIGGQPAGKIVFELFADTTPRTAENFRALTTGEKGVSRGRKPLHYHGSIFHR

SEQ ID NO: 371 - protein, 512 aa, Camptotheca acuminata
MENLYYCLALLLSILFIFRHFFRHSSKLPPSPFALPIIGHLHLIRNSLHQVLECLASQYGPILFLKFGTRSILVVSSPSAVEECLIKNDIIFANRPRSMILDLSSFNYSIFSWAPYGHYWRSLRRLAVVELFTSRSLQTSSNIRKEEIHNLLCHLFKFSKSGTQKLQLKYWFSLLTFNIITRLVAGKRCVRDAVAGTDSGKQILEDLEGKFTSKMPFNMCDFFPILRWFGYKGLEKILITLHKERDEFMQGLIDEVRRKRTCSANINSVTNRAKTTLIEALLSLQESEPDFFSDTIIKSIISDMFFAGPETSTITLEWAMSLLLNHPEVLGKLRAEIDDHVGHGRLLDDSDLGKLPYLRCIINETLRLYPPTPLLLPHCSSEDCIVGGYEIPQGTILWVNAWAMHRDPKLWEEPTKFKPERFEGMEGRERYKFMPFGIGRRACPGASMAIRTVSLALGALIQCFEWENVGPDKREMSQGRLTLPKAESLEAVSIPRPSAVKVLSQLEGTCFR

SEQ ID NO: 372 - protein, 105 aa, Nicotiana alata
MARSLCFMAFAILAMMLFVAYEVQARECKTESNTFPGICITKPPCRKACISEKFTDGHCSKILRRCLCTKPCVFDEKMTKTGAEILAEEAKTLAAALLEEEIMDN

SEQ ID NO: 373 - protein, 266 aa, Triticum kiharae
MGVKGGGVLWCLLLAGLLLLAVACAAERDTEKEKEEEIRWCEEDCDWKAGQDTGKARECKEQCERRRHGHELLQEDGDSFDSCVSKCRGHGGWWGKERWERCRQICRQSQEGEGGDEGDNTDDRCERMCQHYHDRREKKQCMKGCRYGESDLLSSDDGHEHGDRCQTQCKRLRPGSYDRQQCIEKCQCQQKEDEEVMNHHGGGGHGHGGSSCEQKCQQRYRHEYDKQQCVRDCKSGGGGGAGGRGREGDERQHGREMVIEAILEEV

SEQ ID NO: 374 - protein, 320 aa, Euonymus europaeus
MKYLWVFIVFSIAVLSHACSAQQCGRQAGNRRCANNLCCSQYGYCGRTNEYCCTSQGCQSQCRRCGVRTVGEIVVGDIGGIISKGMFNNILKHRDDDACEGKGFYTYEAFVAAARSFPAFGSTGDDATRKREIAAFLAQTSHETSAGWPSAPDGPYAWGYCFVRERNPPSKYCDTTTPCPKSYYGRGPIQLTWNYNYEQAGRAIGADLLNNPDLVATDAVISFKTAIWFWMTAQSSKPSCHDVITGSWRPSASDNSVCHVPDYAVVTNIISGEIEYGKSRNPQVEDRIEFFKRYCQILGVSPGKCYEERTFVSGLMMETI

SEQ ID NO: 375 - protein, 305 aa, Euonymus europaeus
MKYLWVFIVFSIAVLSLACSAQQCGRQAGNRRCPNNLCCSQFGYCGRTNEYCCTGFGCQSNCRRCGVRTVGEDVVGDIGGIISKGMFNNILKHRDDDACEGKGFYTYEAFVAAARSFPAFGSTGDDTTRKREIAAFLAQTSHETSGGRPSAPDGPYAWGYCFVKERNPPSKYCDTITPCPKSYYGRGPLQLTWNYNYAQAGRAIGVDLLNNPDLVATDAVTSFKTAIWFWMTAHSSKPSCHDVITGSWRPSASDNSVRHVPDYAVVTNIINGEIEYGKSRNPQVEDRIEFFKRYCQILGVSPGKF

SEQ ID NO: 376 - protein, 38 aa, Taraxacum officinale
VAKCTEESGGKYFVFCCYKPTRICYMNEQKCESTCIGK

SEQ ID NO: 377 - protein, 44 aa, Taraxacum officinale
GGKCTVDWGGQGGGRRLPSPLFCCYKPTRICYLNQETCETETCP

SEQ ID NO: 378 - protein, 42 aa, Taraxacum officinale
ANKCIIDCMKVKTTCGDECKGAGFKTGGCALPPDIMKCCHNC

SEQ ID NO: 379 - protein, 49 aa, Triticum kiharae
RTCQSQSHKFKGACFSDTNCDSVCRTENFPRGQCNQHHVERKCYCERDC

SEQ ID NO: 380 - protein, 47 aa, Echinochloa crus-galli
RECQSQSHRYKGACVHDTNCASVCQTEGFSGGKCVGFRGRCFCTKHC

SEQ ID NO: 381 - protein, 47 aa, Echinochloa crus-galli
RECQSQSHRYKGACVHDTNCASVCQTEGFSGGKCVGFRGRCFCTKAC

SEQ ID NO: 382 - protein, 30 aa, Amaranthus caudatus
AGECVQGRCPSGMCCSQFGYCGRGPKYCGR

SEQ ID NO: 383 - DNA, 3666 bp, Oryza sativa
  source 1..3666: mol_type = genomic DNA
atggaggccacggcagtgagcattggcaggtccgtgctgaagggagcgcttggctttgccaattccaccttggtggaggaggtttccctgcagctcggcgtccagcgcgaccaggcgttcatcagggacgagctggagatgatgaactccttcctgatggccgccaatgatgagaaagatgacaacaaggtggtaaggaccttggtgaagcaggtccgcgacgtggcctacgacgtcgaggactgcctccaggacttcgccgtccgcttggggaggaagagttcatcctggtggctcagccctcacacgctgtgggagcggcgccgcatcgccaagcagatggaggagctgaggggcaaggttgaggatgtgagccagaggaacatgcgttaccaactcatcaagggctccaagcctaccgtagctaccaatgtcgcacccagcagcactgcccgtgcgaccatgtctggcgcgcatgaagaacgatggcagcatgagaaggcaatagatcatctggttcggctggtcaaaaccaaagtcgatgaacgtagagtgatcgcggtgtggggaacaagtggtgatatcagggaaatgtccatcgttggaggggcctatgatcatctcaagagaagcaacaagtttgagtgctgtgcctgggtaaatttgatgcatccactgaacccaacaaagctcctgcaaaccattgttaggcaattctatgtaagatctcttcaggaggctggcaaagcaactccgtcgtgtcaaattctgagtagcatgttgataaaggaagatcagggtttggggtttagggttctgaggagcatgctgatgaaggaagatcatttgaatgatgagttcaataaatatttgagtgacaagtgctacctcattgtgcttaatgacctatcgtccgctgaagagtggaagcaaattaaaatgctcttcccagacaacaagaaaggaagccgaatcatagtgttcacacaacaagttgaagttgcaagcttttgcgctaggacagaggaggtggcacccgagcacatgcagttgtttgctgatcagactctttatgcttttcactgcaagggtgctaaagatggagtagattcaatggaggactcatctaacttaaacgaagacactacatacaacgctgtagaaggaaagagccttactcgcacatattcaatggtaactgctttcaaggaatctgagatcgttgggcgagttgatgaaataaaggagattattgaactgatttcaaaaggtagcaaccaacttgagaagatctcagtgtggggaatgggtggtattgggaaaaccactctaattcaaaatgtctaccgaagcgaaaaggttaagaagatgtttgataagcatgcatgtgtcacgatcatgcgcccgttcaatcttaatgatcttcttatgatcttagttaggcaactagaagattcaaaaacttctggaggaaaggagttggttagcattttacaaggaaagaaatacttgattgttcttgatgatgtattattcacaacagaatgggatgctatagaatcatatttcccagcaacggaaacaggaagccggatcataataaccacaaggcatgaaagtattgctaagcattgttcaggggatcaacaaggaaaaatgtatcaactcaatcgtctaggagacaacgatgcaaagaacctctttgcaaagaaggtatttaaggagtcagtaaatttggatcaacaagatcttgaattgatcaaagaagcgaaaccgattctaaagaagtgcaatggacttcccctcgcaattgtcaccataggtggtttcttggcaagcagccccaaaactgctttggagtggagaaaattgaatgagcatattagtgcagagttggagacaaacccagggcttgaggccatcagagctgtccttaatataagctacgatggattaccttatcacctcaagtcttgcttcttgtatctgtccatctttcctgaagatgacaagattagccgggaacgtttggtgcgccgatggtgtgcagagggttactcaagggagctatgggacaaatctgcagaggaaatagcaaacaactacttctttgaactcatagacagaagcatgatcctaccaactcaaaaattaacttacaacaatagacctgattcttgccaggtccacgatatcatgcgcgagatagccatctcgaagtcaaaggaggaaaatcttgttcttagactcgaagggggtcataggctacacaatcatggcatagttcgacatctttccattacaaacagcggcgaggatcgggagacagattttgctgaattggagacaacagtagacatgtcccgaataagatcattaacagtgtttggggagtggaagccatttttcatttctgacaagatgaggttgttgcgtgtgctcgacttggaagacacagaaggtgtacgtaatcaccatattaagcaaattgggaagctccttcaccttagatacctttctctaaaacgatgtagggagattgcttacctgcctgattccttaggtaacctaaggcaactggagatactagatatcagaggtacgctcatagtcaggctgccaaagaccatcatcaatcttcgcaagctaaagtatctccgtgctgttccaaacatagacgacatagcagagattctaattctaccagagctcatgaggaacaggctatgcatttctactgtttcgttgctggggctttgtctgctatgctcagcaagtgcgattggtaagtttgatgaagagactagtacccgtgacctctgcaccatgtggtgctgcagtattctccctagcattgctatgcgcctccaagggaatggtgtagtagcaccaagagggctgaggatcaggagactgacagccctgcacacgctaggtgtggtggacatttcatggcagccatcaattttacaagatatcaagaggctcatccagctgcgcaaattggaagtgaccggtgtcaacaagaaaaatagcaaaaagcttttctctgcccttgccgctctcagccaactagaatcattgtcactgttctcgaagtggaagccaggtctctggggctgtctggatgctgaagaaaagttttcgccacctaagaatctcaagactctgaagcttcaaggcaacctggttgagctgccaaaatggatcgggaagctcaacaatcttgttaagctgaagctatcaaaatccaggctcaaggatcatgatgctgctatacaagtccttggtatgctaccaaacctgaccatcctatgcctgccgcgcaagtcatttcactcgcttgagggtggtgaactcaatttctcggagggatctttcaaaagcctggtggttctcgagctccacttcggtgggagcaaacgcgtcaagtttcaacaaggagcattccacaatcttgagctactggagctttcaggttacattgataaagtcgaaactaagttctctgggctagaatttctcccaggaatcaaggaagtctggctccagggtgaattttattccagaaacgagcaagccgcacgaagattgaaagaggacttgctggcacagctttctgagaatccaaagaaaccaatcctgaagactagcgggtatttttag

SEQ ID NO: 384 - DNA, 9576 bp, Oryza sativa
  source 1..9576: mol_type = genomic DNA
ggaaatactagaatgacttacattgtaaaacagagaaagtatgattatctaaactctcagatagtctattgtaatcattgtatgcatgacatcagcttgtgtcaaagctgcagctttgttggatcaaccagaatttactagttctaaaaaaaacagaatttacttagatcctgctgaaagacttcgggccaattagaagcccagtatttggcccaaaactggtgtaaactacaggcccataatagaaataagttcactggaggtcccccaacttaacaccgagatttttttgaggtcccttaaccataaaccagaaatgcgtacccctaaactatgtaaaaccgtcaaaaaaaaaaaggtcccgaggcagtatagttgctcggtttcgctgacgtggcatcctagtcagcaaaaaaaattaaaataaatatgtggggcccacatgtaagtgagagaaaatggtgtgggccccacatttctcctttcttttctttttctcttctcttctctcccgattttctcgagtgggcgcggcggcagaggggagagaggtgaccggcggtggagcgggggtggtgggagaggggggctggcgcgacgtcggcggcgggagaaaaggagaggaggcggctggcgcgacggcgagctcggacggcaacggcgggaggaggaggaggagaggaggcagtcggcgctgtaaaacgcgcatgggatgcggcggatgatgtcgagcgggacggtgtcctcatcaccatcttcctcatcgtcatcgcagtctgcgggtgccgggcggagcggtttgggagggagggggaggcggccagcgagcccgttcgagctcgcccggcctgcgcgcgagctcgcccctcccatagcttggtgtgctggggacgacgacgaggaaagggggagaaaggaattgacggccgatgatagcaatggcgggcgagcgcggcgccgggctgctcatgctcgccgaccaggcccccggcttcgccgcactcgtccgccgtgctcgcccacgcactcgccgacctccgctccacccgccgctcctgcccgctgcccgctgcccgccggcctccctgactgaagaagagaagagagaaattaaagagaagagaaggagaagaaaagagaagagaagaaaaaaagatgtgtagctgacatgtgggccccatgtacttttttattttttttgctgactagaatgccacgtcagcgaaaccacccatatatactgtcataggaccttgagtgcatagtttgtgtgagtttagggatacacatttctcgttttgtagttaagggacctcgtaaaaatctcgctgttaagttgagagacccctccggtgaacttattcccccaaatattttctccatgctctgggctcaaacgcactcttggatgggccgtgtaatctacaccatttctggcccaatccaacgaaggtagctccagactcctaactccgccgccgcatgcccaatcctcgccggccgccgctgccatctcccttcccccaccgccaccgtcgccttctccgttcccccaacaaaggctcagtagcagcagccgcggcgcggagagcagaggccttggagggcctgcagaggagcgcccgcgtcgacgaagacgacatcagcaggcagtggacatggcgactgcgaatgctatcgccgacgtgggagcttcaggcgaggatgcgtggccttcatcagctgctgctcccttacctgctctggtttgtcattgtgttggttcgtggtttggggatatcaggatggggaaggggaatgggtttcgtgccatgttgttctattgtgcaatttgatgttctcttgtcgaatttcatggtgattcaatctgcatctgtgttattggttgtcaagcaaacattttatttctttcgagatgggtgtttcatctgaaattggtgtgtctgatgatgtgaccttgtgcaaatcattgtttcattttcttctattccacagagatttttttgtttagagtttattctaccatcttcttaccttttgaatgctatgcaccacagatttctgatttttacacattcaatcacagtgccgacccttggcgaatttaaaattttctcaccgtcaaaatttaatcaaacatctgatctaacagtagtagcgccagcacggctggtatttaaggcagaaagaaaggttgcgagggcgaggagttggtgatgatctgccggtcgtgtcgtgactttaggctataaaagatagctgtttggattaacccaaccaatgaagcgaatcatcgatggccgatagcgagattatatccaactaatgaagagaatcaactttaatcttttgtgagctacaagtttcgtggtgaaggcatatactaataccaccatcatggctgcagcgaatcaacgagatgcatttgtcttgcacatttcccaccggatactttgccatccatggctttatctcctccatgattgtatccccttcttcctcaacaaggaacgatcgatcattgtttgcttctttctctgacgacactttggtgcaagtgaaaggctctttcctggaactcgtcccgtgagctccttcctggctacatcctccttaattccttgccgatttccggcttcgtcttcactatcgtcagttcatttctcccgctctgcctgagagtccagtttcttggagatagtcgccggcttgctctctctctctctctcccttctcatcgccagctccagctcacaatccgagcttacgtggtggaatcgctatcgccacctctcggaagattattgtactttgccttgcctacttcttgagtccgatcaaacacatccatcatgcatctgtttgtacttgcattcagccaaacacttccagtttaactccgtccgcaagtcaatacttgcattcaatttccatttcctacaaaagcagctgctcagactcttgccttctccacccagcaatcgtgtttccttccctgtatcctgcgcgtgtgttcttagctgctctaggggatccttccaatggcggagctaatggccaccatggtggtcgggccactgctgtccatggtgaaggacaaggcctccagctacctcctggagcagtacaaggtgatggagggcatggaggagcagcacgagatcctcaaacgcaagctgccagccatcctcgacgtcatcgccgacgccgaggagcaggcggctaaacacagggaaggggtgaaagcatggctcgaggcgctccggaaggtggcctaccaggccaatgacgtcttcgacgagttcaagtacgaggcactccgccgcaaggccaaggggcactacaagatgctcagcagcatggttgtaatcaagctcattcctactcacaaccgtattctgttcagttataggatgggcaacaagctcaggatgattctgaatgccattgaagttctaattgaagagatgaatgcctttaggtttaaattccgaccagagccaccaatgtcgtccatgaaatggaggaagacagattctaaaatctccgacctttctttggacattgccaacaactcaagaaaggaagataaacaggagattgtcagcagattgcttgttccagccagcgaaggggatctcactgttcttcccattgtaggaatgggggggatgggcaagaccaccttagcgcagctcatttacaatgaccctgacattcagaagcatttccagttgctgctctgggtgtgtgtttccgacaacttcgatgtggatttgctggctaaaagcatagttgaagcagctcgcaaacagaagaatgataacagtggaagtactaacaagtcaccattggatgaacttaaagaagttgtgagtgggcagaggtacctcctcgttttggatgatgtctggaaccgtgatgctcgtaagtgggaagcgctcaagtcctaccttcagcacggtggcagcggtagctcagttttgacaacaactcgtgatcaagaagtggctcaagtgatggctccagctcaaaaaccttatgatctcaagagactgaaggaaagcttcatagaggaaattatcaggacaagtgctttcagttcacaacaagaaaggcctcctgagcttctcaaaatggttggtgatattgccaagaaatgttctggttcccctttagctgcaacagcattgggctctacactgcgtacgaagaccaccaagaaagaatgggaggctatattaagcagaagcacaatttgcgatgaggaaaatggaattttaccaatactcaagctcagttacaattgcttgccatcatatatgcggcaatgcttttccttttgtgcaattttccccaaggatcatgagattgacgtggaaatgctgatccagttatggatggccaatggttttatcccagagcaacaaggagagtgccctgaaatcattggtaaaagaattttcagtgagttggtgtcaaggtcattttttcaggatgcgaaagggatcccgtttgagttccatgatataaagaactctaagattacttgtaagatccatgaccttatgcatgatgttgcacaatcctccatgggaaaagaatgcgctgctatagatacagaagttagtaaaagtgaggattttccttattctgctcgccatctatttttgtcaggtgatagaccagaagctattcggactccttccccagagaaaggatatccaggtatccaaacattaatatgttcacgtttcaaatatttgcagaatgtatcaaaatacaggtcattgcgagtattaacaacgatgtgggaaggttcattcctgataccaaaatatcatcatcacctgaggtatcttgatctctcagaaagtgaaattaaagcacttcctgaagacataagcatcctatatcatttgcaaacattgaacctttcccgttgtttatctctccgtcgacttccaaagggaatgaagtacatgaccgccctccgtcacttgtacactcacggatgttggagtttaggaagcatgcctcctgacctcggacacctcacttgcctacagacgcttacatgctttgtagccggtacttgctctggctgcagtgatttgggagagctgcggcagttggaccttggtggtcgactagagctaagaaaactggaaaatgtgacaaaagctgatgcaaaagcagcaaatctcggaaagaaggaaaaactgaccaaattgaccttaatatggactgatcaggagtacaaggaggcacagagtaataatcataaagaggtgctggaaggtctcacgcctcacgaggggctcaaggttctgagtatatatcactgtgggagcagtacatgtccaacttggatgaataaactgcgggacatggtggggcttgagttaaatggttgcaaaaatctcgagaagcttcctccgttgtggcagctaccggctctacaagttctttgcctggaaggactgggtagtttaaattgcttgttcaactgtgacacacacacacccttcacattttgcagactgaaggagctaaccttgtctgatatgacaaattttgagacatggtgggacacaaatgaggtacaaggagaagagctgatgtttcctgaggttgaaaagctgtcaatcgaaagttgccataggctaactgccttgccaaaagcatcaaatgcgatttcagaatcgtccggcgaagttagcaccgtgtgtcgttctgcatttccagcattgaaggaaatgaaattatatgatttgcgtatctttcagaaatgggaggcagtcgatggaactccaagggaggaggcaacatttcctcagcttgacaaattagaaatcagacagtgcccagagctgactactctacctgaagcaccaaagctaagtgacttagagatatctaaaggcaatcaacaaatatccctacaggcagccagcagacatattacttcattgtccagtctcgttctgcatttgtccactgatgacacagaaacagcatcggtggccaagcaacaagattcgagtgatttggtgattgaggatgagaaatggagtcataaatctcccctggaacttatggtcttgagtcggtgcaaccttttattctctcacccaagtgcactggctctgtggacatgttttgctcagctcctagatctgaaaattcggtatgttgatgcgcttgtcagctggccagaagaggtgttccagggcttagtttccttgaggaagttagagatttctgtatgcgagaatctgacaggacacacacaagctcgtgggcaatctacacccgcaccaagtgaactcctgccacgtttggagtccctagagataacgtgttgtgattctattgtggaggtccccaatctaccggcgtctctcaagctattagaaattagggggtgccccggcctggagtccatcgtattcaatcagcagcaggataggacgatgttggtgagtgcagaaagctttgcagagcaggataagtcatcgttaatatcagggtccacaagcgagaccaacgatcacgtccttccacgcctagaatctcttgtaataaattggtgcgatcgtttggaggttctccatcttcctccgtccatcaagaaattgggtatttatagctgtgaaaaacttcggtccctctcagtaaagctggatgccgttcgagaattaagtatcagacattgcgggagcttgaaatcactggaatcttgcttaggagagctcgcgtcgctgcaacaactcaaactttttgattgcaagagcctggaatccttgccgaaggggcctcaagcatactcatctcttacatctcttgaaattcgtggttgttctggtataaaggtgcttccaccgagcctacagcaacgtctggatgacatcgaggacaaagaactagatgcctgctatgaaggtaatcttcagtttcttaaccgtgtaccatttagtggtaaaagtttcgagtttcgtgtctagaacccctagtcaaccattaatatgattatatgtacatagagtacaatgcgcattcataactcacttctgcagctgtgtcatctaaaccctttaaactttgagttgcatttgggtatctaatcgcatgcaaaggaatttagttatatctcccgtagccattccttatatgtgatgatctcttcctgtgattatgcttgctagtttggactatgtaattaattttgccgggtgactatgtaattacatgacttcatttagtcgccaggtgtggcatcatgcaattattatggcaaagctgtattagtcatgatcgaagccacttggtgaacttattccctgctactttgaaccaatactcattgattatttccctttaagcgtttgatatggacgacagtttaaatttgcagagctaactaacgcagcgcttgtctttacatttctctggaaactcacagctccattgcatatgtagtttgagtatacatagtttctttgaactgtcttatgcctttgaaaagcttgactatggaattctagtctatatattcaatacatatatttttttttcttttgtttgccagaggcagaagcagaaccaaagtctcgtcatcgtcaatctgcaatcagtaggctgatgtgcttgaagtagcagtttcaggaccagatgagagttgtcatcatggtttgtaacgcgtgcttgatgattgatttcgaatgaaattctagccactatccttatgcttactctctctatggtgtgacttccttgtaggatcgttaccgaatctgcaattgttgggttattaattgtgtggttgtatctcatggtagaatgtattacctacctaccctttctcaagataaactccagtaaagtcgatcgtctggttggtgtgagctgctacaagaaggatgaagccgatgatcccaaggccttgactttaagctagtcccaggttgtaagctgaagaacaacatactggagcttaaactgcttcactctttttttatccttttccttttcttgtgaactgtgatgtgtttgatctcgttcatgctccatcataagagaatcacagctagcacttccatttcaatgatgtttttcctaacatgacatgactgcagaggatacttgtgattgatcaacaacattttgcagcaacgttctctcccgataacgctgcaatggaattgatcaattggtgttcctacttattggaatgaatttcccattgtggaataaaatggaaagattggtacaatctgctgaaaaatgaactgtcgttactcaagttgaaacatgtgtcatgtgtgtaactatcagaattgttctcgacaaaatcgttgggacttgcaaggtaaaaaaaaaaaattcctcagctctgtaaatgctattgctgaactaaagttcagaaagctatagtgccgaaagatctcagatggcctactgcaacaaaattcagtacaaatgcaaaacaatgtaacattacgtggcccagcccatcatggtaagcccatactgtatgcgctgcaaactaatattagttcaggcaattactctgaaatttctgatagacgaacctgattttttcatgtcaggtgccgtgcttgttcagattcagcaacttacatttccaaagaagaaaaaggaaattcataccttctctttatttggtttttaaaagtggcctggattttcattatttggttaaaatttggcctttgtcgtaaggatttggatcctctatccaaacacatgccttccaagataaacgaatccctcattatacaaaaaaaaaagcacaagatgctcaacaagaagcttcaaattcgtgtaaatacatgtcatgtctcgctaccaaacaatatctcaacaatgacaacagattggaggtattcatctcacaatgatacatttcaacacaaatttatgtaggcctcgctgacaggacttggctggatggctgtcagttcagttcttgaaccaactgaagcatgagcagccctgcaaggaagcgataaactgaattaaaataggaatttgttacacaatacctgtaaagtggattacattaaaatattaccaaatcatactgtaagcaatcatacagtacaagattccttgcaaacaaccctaaccaaacttctagtaaaaccattattttttctgtagtaccaactttttgcaaccactatatactccagtaaaaaccagaagtattgttgcaatgactttgccgataaattatagaacgcggctactcgaagcagtagatttaagacaatttttactgcataataactacgcatggtgtcaagatccctaaaaattaacagaggcagacccagctcaagtattgacaaactcaagtggcaactggcatatgaacaattttctcgttcaaatatatctgaagcaatgtgtaaaacaaattagttttgctccacacatctgacaataatttttttcagtaagcagacttactgtggattcatatttgcgttgttgatagcgtttgatataatctgcctcgctagtcatgacgggagcgttgccggtacc

SEQ ID NO: 385 - DNA, 3720 bp, Arabidopsis thaliana
  source 1..3720: mol_type = genomic DNA
atggattcttcatgtttcttggtttatagaatattcagatttcgtaaaagaaataagaatatttcttcttctctatcttcttcatctcccccttcttctttgtctcaaaattggttgcaccctgttttcttgagcttccgtggggaagatgtccgcaaaggcttgctcagtcacattcagaaggagtttcaaagaaacggaatcacaccgttcattgataatgagatgaagagaggaggatccattggtcctgagctcttacaggctattagaggatctaagatcgcgatcatcttgctttcgaggaactatggttcttcgaagtggtgtcttgatgaattggtggagattatgaaatgcagagaagagttgggtcaaacagtgatgaccgttttttatgatgtggatccatctgatgtgaggaagcagaagggagattttgggaaggtttttaaaaaaacttgtgttggaagaccagaggagatggtacagagatggaagcaagctttgaccagcgctgcaaatatactcggggaggattctcgcaactgggaaaacgaagcggatatgatcattaaaatctcaaaagatgtctccgatgtgttgagttttacgccatcaaaggattttgatgagtttgttggcattgaagctcatacgacggagataacttcgttgttacaacttgatctggaagaagtgagaatgatagggatttggggtcctgctggtattggcaagacgaccatctccagagttctatataacaaactctttcatcagttccaactgggcgcaatcattgacaacatcaaagtacgttatccaagaccttgtcacgatgagtacagtgcaaagctgcagttacagaaagaattgttgtctcagatgattaaccagaaagatatggtggttcctcatttaggtgttgcccaagagaggttgaaggacaagaaagttcttctagttcttgatgacgtcgatgggttagtacaacttgatgccatggcgaaagatgtacaatggtttggccttggaagtcgcattattgtcgtaactcaagatctaaaacttttaaaagctcatgggatcaagtatatttacaaagttgattttccaacttctgatgaggctcttgaaatcttctgcatgtatgcttttggtgagaagtcccctaaagttggttttgagcagattgctcggacggttacaacacttgctggtaaactcccgttaggactaagggttatgggatcatatttacggcgaatgtcgaagcaggagtgggcgaaatcaataccaaggctaaggaccagccttgacgatgatattgagagcgttttgaagttcagttacaactccttagctgaacaagagaaagatttatttcttcacataacctgttttttcagaagggaaaggattgagacattggaagtatttcttgcaaagaagtctgtagatatgaggcaagggctccaaatcttggcagataaatctctcttatctttgaacttgggaaatatagagatgcataatttgctagtacaactaggcctagacattgttcgtaagcaatctattcataagcctgggaaacgtcagttcttggttgatactgaagatatttgtgaagtactcactgatgatacgggtaccagaactcttataggcatagatcttgagttatctggtgtaatcgagggcgtaataaatattagtgaaagagcctttgaaagaatgtgcaatctccagttcttaagattccaccatccatatggtgatcgttgtcacgacatattgtacttaccgcaaggtttgagccatatatctcgaaaacttagactacttcattgggaacgttatccactgacatgtttgcctcccaagtttaatccggagttccttgtcaaaataaacatgcgagacagcatgctcgagaagctgtgggacggaaatgaacccattagaaacctcaaatggatggatttgagtttttgtgtaaacctgaaggagcttcctgatttctctactgccactaatctccaagaattgagactcataaattgtttaagcttggtggagcttccctcttccattgggaatgccactaatttactggaattggatcttattgattgctcaagtctggtgaaactcccctcctctattgggaatctcacaaatctaaaaaagttgtttctcaatagatgttcgagtttggtgaaactcccttcctcttttgggaatgtcactagtctcaaggagttaaatctcagtggttgttcaagtcttctggagatcccctcttccatcgggaatattgttaacctcaagaaagtatatgctgatggatgttcaagtctggtgcaactcccttcctctattggaaataacactaatctcaaggaattgcatctactgaattgctcgagtttgatggaatgcccttcttctatgttaaatttaactcgtctcgaagatttgaatctcagtggatgcttaagtctggtgaagctcccctctattgggaatgttattaatctccaatcattgtatctcagtgattgctcaagtctaatggaactccccttcactattgagaatgccactaatctcgatacattgtatcttgatggatgctcgaatctactggagcttccctcatctatttggaatatcactaatctccaatcattgtatctaaacggatgctcaagtctaaaggagctcccttccttggttgagaatgccattaatcttcaaagtttgtctcttatgaaatgttcaagtttggtagagctcccttcctccatctggagaatcagtaatctctcatacttagatgtcagtaactgctctagtttgctagagctcaatcttgtctcgcaccccgtggttccagattccctaatcctagatgcaggagattgtgagtctctggtgcagagactagattgcttctttcaaaatccaaagattgttctcaacttcgctaactgcttcaaactgaatcaagaagcaagagatctcatcatccagacatcggcttgtagaaatgcgatattaccaggtgaaaaagtgcctgcatacttcacgtaccgcgctactggtgattctttaacagtgaagttgaaccagaagtatcttcttcaatctttgagatttaaagcttgccttttgctagttgagggtcaaaacaaatggccaaattgggggatgaatctagtaacttctcgagaaccagatggacacattgttctgtacacaccaagcagccatcttcaaggtccacttttaatggagaatctgtatacattcgaatttgaactagtggtgacttccagtgagttcgttttggagttcagagctgatcgttacaagtgtgcggtaagcgaatgcggcctaatccaactcttttaaatccctttatgtccatgagcttcagaggtcagtggaggctgttattttgcagtctttgagatttgagacaaacactagactgaagttagggcatgacaagagctgaaatacattaatgctatatgatgaaacattttcttttaaagttgggtcgatttgacaagtttggtgtgcatgttgtgtggtgtcacttagtatgattatcattactatatatgtgatgttggtaatatgtataatttatcaattaagtcacagtatacatctatgtgtttatatgtagatattacagcgaag

SEQ ID NO: 386 - DNA, 2845 bp, Arabidopsis thaliana
  source 1..2845: mol_type = genomic DNA
caaagacttttgaatgtctcccaccaaattctgatgaatgaatatgtggatgtggtatttcatggaccagcacaaaagagcatttcaagaagtcgtttggtagctgtaccatctaattatgttcacatgatgctgagagttgaataattcagaaagggacaaagagtgttatgattgcgttgacttggagtcatgtttcatgaaggtagtgcgtagttgactcttttctagtgtaggaggtagagatttgggagagtcactagaacacgaaatggcagaggctattgtttctgttacagtgcagaagctaggacagttgctcttggaagaaccgttgttcttatttggtataggtgaccaagtgaagcagctgcaagacgaattgaagcgtttgaattgctttttgaaagatgcagatgagaagcagcatgaaagcgagagagtgcgtaactgggttgcaggcattagagaagcttcttatgatgcagaggatatcctcgaggcatttttcctcaaagcagaatcaaggaaacaaaaagggatgaaaagggtgcttaggaggcttgcttgcatcttgaacgaagcggtttcacttcatagtgttggctcagagattagagagatcacctccaggctttctaagatagcagcaagcatgctagattttggtataaaagaatctatgggcagagaaggtttgagtttgtctgatagtctaagagaacagaggcaatcgtttccatatgttgttgagcataatcttgttgggttagagcagagtctagagaagttggtgaatgatttagtttccggaggtgagaaactaagagtcacgtccatctgcggaatgggtggtttggggaaaacaactttagccaaacagattttccatcaccataaagtgaggcgtcatttcgatagatttgcttgggtatatgtttctcaagactgtagacggagacatgtttggcaagacatttttctgaatctcagctacaaggatgaaaatcagagaatactcagcttgagggatgaacaacttggagaggagttgcatcggttcttgaaaaggaataaatgcctcattgtgcttgatgatatctggggcaaagatgcttgggattgtctgaaacacgtctttccacatgaaacaggaagcgaaataatcctcactactcggaacaaggaagtcgctttatatgctgatcccaggggtgtgcttcatgagccacaattgctaacatgtgaagagagttgggagctgttggagaaaatttcattatctggaagagaaaatatagagccaatgttggtcaagaaaatggaggagattgggaagcagatagttgtaaggtgtggaggtttacctctagctataacagttcttggaggacttctggcaacgaaaagtacatggaacgagtggcaaagagtatgcgagaacatcaaatcatatgtttcaaatggaggtagtagcaatggaagtaagaacatgctagttgcagatgttttgtgcttgagttacgagtacttgcctccccatgtaaagcaatgtttcctctactttgctcattatcctgaagactatgaggttcatgtgggaacactagttagttattgcatcgcagagggaatggttatgcctgtaaaacacacagaggctggcacgacagtggaagatgtcgggcaagattatcttgaggaattagtaaagagaagcatggttatggttgggaggagggacattgtaacttcggaagtcatgacatgccgtatgcatgacctcatgagggaggtgtgtttacagaaggcaaagcaagaaagctttgtgcaagttattgattcaagggatcaagatgaagctgaggcttttatatctctttcgaccaatacatctcgtagaatttctgtccaactacatggtggagcagaggagcaccatatcaagagtctgtcgcaggtttccttcagaaagatgaaacttcttcgagttctagatcttgagggagctcaaatcgagggagggaagttgccagacgatgtaggagatctcatccatttgaggaacctgagcgtgagattgacaaacgtgaaggaacttacatcatctattggaaacttaaagttgatgattactctagacttgttcgtgaaagggcaactgtatattccaaaccaactctgggattttcctgttggaaagtgcaatccaagggatcttttagcaatgacaagtcttagaagattgtctatcaatctttcttcgcagaacacagacttcgtggtggtgtcttcactaagtaaagtcttgaaacgtctccgtggcttgacaataaacgttccatgcgaacctatgcttccaccagtagatgtaacacagttggtctctgcatttactaatctctgtgaactggaactgttccttaaactagaaaaactcccaggagaacagagtttctcctctgatcttggtgctctacgtttgtggcaatgcggattagtggatgacccgtttatggttctcgagaagcttccaaacttgaagattctccaactgtttgaaggatcatttgtaggtagtaagctttgttgttccaagaatctagagaatctagaggagtggactgtagaagacggtgccatgatgcgtcttgtcaccgtggagctaaagtgttgtaacaaactgaagtcagttcctgaaggaacgagattcctaaaaaatctacaagaagtagagattgggaacaggacaaaggcatttaaggacaagctaatctctggtggtgaagatttctacaaggttcaacatgtgccttgtgttgtttttgagaactgtgaactttaa

SEQ ID NO: 387 - DNA, 3152 bp, Arabidopsis thaliana
  source 1..3152: mol_type = genomic DNA
agcttttttgtttgtctattagagattagtcaacgtagtgatgacatactgacatctttggattgtttcaaagtttacgtttttactatacattgactagtcttagagattttatattatgcatatagtgacatagacttttcctttcttatctattcctcttctctacctaatctgtgaatctctctctctcactctctctcttttccttgattgtgcagagatgggaggttgtttctctgtttcattgccatgtgatcaagtagtgagtcagttctctcagttgttatgtgtcaggggaagttatattcacaatctctccaagaatctggcttctctgcagaaggccatgcgaatgctcaaggctcggcaatatgatgtgataagaaggttggaaacagaagagtttacagggcgtcaacaaaggctttcccaagttcaggtatggcttactagtgtcctaatcattcaaaaccagtttaatgatctgcttcgtagtaatgaagttgagcttcaaaggttgtgtctttgtggtttctgctccaaagatttgaaattgagctatcgttatgggaaaagagttatcatgatgttgaaggaagttgagagtctcagttctcaaggattctttgatgtggtttctgaggcaactccgtttgctgatgtggatgagatcccttttcaacccacaattgttggtcaggagataatgcttgaaaaggcatggaaccgtctcatggaagatggatccgggattttgggtctgtacggtatggggggagtaggcaaaacgacactactcacgaagatcaacaataagttttctaaaatagatgacagatttgatgttgtgatatgggttgttgtgtctagaagttcaacagtccgtaagatacaaagagacatagcagaaaaggtaggccttgggggaatggagtggagcgagaaaaacgataaccagatagccgttgacatccacaatgtccttaggagacgaaagtttgttttattgttggatgacatatgggagaaagtgaatttaaaagcggttggagtcccgtatccaagcaaagataacggatgcaaggtagcattcactactcgttctcgagatgtgtgtgggcgcatgggggttgatgatccgatggaagttagctgtctacaacccgaagaatcttgggatttgtttcaaatgaaggttgggaaaaatacactgggaagtcacccagacattcccggacttgctagaaaagtcgctaggaaatgtcgtggcctaccattagcactcaatgttatcggtgaagctatggcatgcaaaagaacagtacatgaatggtgtcatgccattgacgttttaacatcatctgccatagatttttcaggtatggaagatgaaattctccatgttttgaagtatagctatgataatttaaatggggagctgatgaaatcctgcttcctctattgctctctgtttcctgaagactatcttattgataaagaggggttggtagactactggataagtgagggattcataaatgaaaaagaaggcagagagaggaatattaaccaaggttatgagataattggtacccttgtccgtgcatgtttgttgttggaggaagaaaggaacaaatcaaacgtgaaaatgcatgatgtggttcgtgagatggctctatggatatcatccgatcttgggaagcaaaaggagaaatgtattgtgcgagctggtgttgggttacgtgaagtaccaaaagtcaaggattggaacactgtgagaaagatttctttgatgaataatgagattgaagagatatttgacagtcacgagtgtgctgcacttacaactctatttctccaaaagaacgacgtggtaaagatctcggctgaattctttcgatgtatgcctcatctggtggttttagatctatcagagaatcagagtcttaatgaattaccagaagaaatatcagagctggcctctttgagatatttcaacttgtcatatacatgtatacatcaactacccgttggtttatggacattgaaaaagctaatacatctgaatctcgaacacatgagcagtcttgggagtatattagggatatcaaatttgtggaatttgaggacattgggactacgagattccagactgttgctagatatgagtttagtgaaggagctgcagctcttagaacatctagaagttataaccctagatatatcatcaagtttggttgcagagccattgttatgctctcaaaggttggtggaatgtataaaagaggtagattttaagtaccttaaggaagaatcagtgagagtattgactttgccaaccatgggtaatctccgcaagctcgggataaaaagatgtggaatgagggagataaagatagagaggacaacttcatcatcgtctcggaacaaaagtcccacaactccatgcttctcaaacctctccagagtctttatagctaaatgccatggtcttaaggatttgacgtggcttttgtttgctcctaatcttacttttcttgaagttgggttctcaaaggaagtagaggatataattagtgaagagaaagctgaggagcattcagctacgattgttccttttaggaaattggagacactacacctgtttgaattacgcgggctcaagagaatctatgcaaaggctctgcattttccgtgtctgaaagttatccacgtagaaaaatgtgaaaagctgagaaagcttccattggattctaaaagtgggatcgcgggtgaagaacttgtcatatattatggagagagagaatggatagaaagggttgaatgggaggaccaagcaactcaactccgtttcttaccttcatccaggtggcggtggagagaaacataatgaacttcactttcttctacaaacttttgttgtcatggtctaaagacatttgccggtgtgtaaatctcttccttgtctcttcttgtttgcataaccgttctcatcgttcttttggttagtgatcattggatttgtacttatctctttctctaaacgatgagtgtttgtttcggcttcatagaaacattacacagagactcatgagaaaatgaataaaaacttgcaagttcctaaccattgtaataaaataataattaac

SEQ ID NO: 388 - DNA, 1159 bp, Arabidopsis thaliana
  source 1..1159: mol_type = genomic DNA
gtttggtttaggcatctgaaatctaccgaaatgggccggtaattagctcatacccaacacgaccagaccagaccgacccgacccgacggctccagattcatccatgtttcatcttcctcatcagatctaattcaatctgcgaatttctcttaaaccctaaccctctcgctgccgtccggtggtttttccgacgacgaactatgacgattcacgctgcagtaatccagaagcttctgaacaccggagcacatctcggccgtcgtgccgccgagcaccatttcaagcaatacgcttacgggacgcgtaacggaatgacaattatcgactccgacaaaaccctaatttgcctccgtagcgccgctcatttcgtcgctaacctcgcccacatgagaggtaacatcttcttcgtcaacacgaatcctctcttcgacgaaatcattgagctcacttctcgtcggatccaaggagattcgtataatcacaaccgtgcgatgaatctgtggaagatgggagggtttttgactaacagctacagtcctaagaagtttcgatctaggcataaaaagctttgctttggtccaactactatgcctgattgtgtcgttgtgtttgattctgagaggaagagctctgtgatacttgaggcatcgaagcttcagattccggttgttgcaattgtggacccgaatgtgccattggagttctttgagaagattacgtatcctgtgccagctcgtgattcggtcaagtttgtgtatttgttctgtaatgtgatcaccaagtgctttgtggcagaacagatgaagttggggatcaaagaagggagcaatgaagatttgatgaaggatttagctgcttgattttgatatttgcaacaaaagtatgaaactttacagttgtttttctgagtctggaataattgttcttcagaattgtggttacttcaactttgaaattctgggagttttttacacatggatgattttgtttctctgatggatatttctgtataagattgttgagttctagtgttctacatcttgataactgccttgtcttttccttgcacaactcattttttggaaatgctttagacattgtatatggtaatcgttacttcacaagttttggaatgagctatttacaagtaactgtctgg

SEQ ID NO: 389 - DNA, 3126 bp, Arabidopsis thaliana
  source 1..3126: mol_type = genomic DNA
caatgataagattctaaagtagattgagacaagtttcgtagtcggcagcagtaaccaagaaaacgagtaaggttgactcttgacttgttaaaccattgacttcaatttcgataaagtctctatgtaagctcatttttctgaaacaagttttgctaaaaaaatccaaagatctgaagcttcagatccttctcggctaaggctaagtcacaaccttgtaagtttactttactttggttagatttgtttcaatgttctaggattctacatgtttcttgagaagatatggattagttaaagaataatccaatcttttggttattgagattctatagtcgttggttgattgatttttggaaagttcaatctagtgatgatacacataaccgattgaattattgcttggttatagtttaccaattagagatatttcttgaagttgcagggtctgagtaaatggtggacgctgttgtaacagtgtttttagagaaaaccttgaacatcctcgaagaaaaaggccgaaccgtatcggactaccgaaaacagttggaagatttgcaaagcgaattgaaatatatgcagtcttttctcaaggatgcagagaggcagaagagaactaatgaaacgttgcgtactcttgttgcggatttacgagaactggtttacgaagctgaggatatacttgtggattgtcagctcgcggatggtgatgatgggaacgagcaaaggtcatcaaatgcgtggctttcgcggcttcatcctgcccgggttccgttgcagtacaagaaaagcaaacgtttgcaagagatcaatgagaggataacgaaaataaagagtcaagtagagccttatttcgaattcataacgccgagtaatgttggaagagataatggaactgatcggtggagctctccggtgtatgatcatactcaggtggttggtttggaaggagataaaagaaaaatcaaggagtggctctttcgatcaaacgacagccagcttttgataatggcctttgttgggatgggagggctaggtaaaactacaatcgctcaagaagtgttcaatgacaaagagatcgaacatcgtttcgaaagaaggatatgggtgtctgtgtcccagacttttactgaagaacagatcatgagaagcatattgaggaacttgggggacgcgagtgttggagatgatattggaacattgctgagaaaaatccagcagtatcttttggggaaaaggtacttgatagttatggacgatgtatgggacaagaatttgagctggtgggacaagatctaccaaggactgcctagaggacaaggaggtagcgttatcgtgaccacaaggtcggaatctgtagcgaaaagggtgcaagcgagagacgacaagactcaccgtccagagctccttagtcctgataacagttggctgctgttttgtaatgtggcatttgcagcaaatgacggtacttgtgagcgtcccgagctagaggatgttggcaaggagattgtaacgaaatgcaaaggtttgcctttgacaatcaaagcggttggtgggttacttctgtgcaaagaccatgtctatcatgaatggagacgaattgcagagcattttcaggatgagctaagaggaaacacttctgaaactgacaatgttatgtcttctctgcagttgagctacgatgaactcccttcccaccttaagtcgtgcattctcacgctttcgctctatccagaagactgtgttataccaaaacaacaactagtacatggatggatcggagaaggttttgtcatgtggagaaacggaagatctgcaactgaatctggagaagactgcttttccgggctcacaaacaggtgtctaatagaagttgtagacaaaacctatagcggaaccatcatcacttgcaagattcatgacatggttcgtgatttggtgatcgatatagccaagaaggattcgttctctaacccggaaggcctcaactgtcgtcaccttgggattagtggaaactttgatgagaagcagatcaaagttaaccataagctgagaggcgtagtgtcaacaactaagacaggtgaagtgaacaagctcaactcagacttagctaagaaattcacagactgcaaatatcttcgggttctcgatatctcgaaatccatatttgatgctcctctgtctgagattttggatgagattgcaagccttcaacacttagcatgtcttagtttgagcaacacacatccgttgatccagtttcctcgttccatggaagatctccacaaccttcagattctagacgcaagctactgtcagaatctgaaacaacttcaaccttgcatcgtcttgttcaagaaactccttgtacttgacatgacgaactgtggatcccttgaatgcttccccaagggtatcggaagtctcgtgaagctcgaagttctgttgggatttaagccagccaggtccaacaatgggtgcaagctcagtgaagtgaaaaatctcacaaaccttcggaaacttggtctttctctgactcgtggcgatcagatagaagaggaggagcttgattctttgataaacctaagcaagctgatgtccatttcgatcaactgctatgatagctacggcgatgatctcataaccaaaatagacgcccttactcctccacaccagctccatgagctttctctacaattctatcctggaaagtcgagtccatcgtggttgagtcctcacaagcttccgatgttgaggtacatgtcaatatgttcaggtaatttggtgaaaatgcaggaaccattctggggaaacgagaatactcactggagaattgaaggtttaatgttaagttcattgtcggacctagacatggactgggaagtgctgcaacagtcaatgccgtacctgaggaccgtgaccgcaaactggtgtccagagctagagtctttcgcgattgaagatgttggctttagaggcggagtgtggatgaaaacaccattgcacagaacctgatgaaacgttttaagcaactagatcaatgtttattaaacagtgacaataagttggtgtattacatataccttgatacaatgtaatgttgctttgaccgtttggatttcatatcgc

SEQ ID NO: 390 - DNA, 1170 bp, Arabidopsis thaliana
  source 1..1170: mol_type = genomic DNA
gaaaacggcccatataaatccaccaaacgaatcttctctcttggtataaatatgctgtcttgcgttacagagaaaccctagacgtcgaagatgaagttcaacgttgcgaatccaactactggatgccagaagaagctcgagatcgacgatgaccagaaactacgtgcgttttacgacaagagaatctctcaagaagtcagtggagatgctttgggcgaggagttcaaaggatacgttttcaagatcaagggtggttgcgataagcaaggtttcccaatgaagcagggagttttgactccaggccgtgttcgccttttgcttcaccgaggaactccttgcttcagaggacatggaaggagaactggtgagaggagaagaaagtctgttcgtggttgcattgtgagccctgatctctctgttctgaaccttgtcattgtgaagaagggtgagaacgatcttcctgggcttaccgatactgagaagccaagaatgagaggaccaaagagagcctccaagatccgtaaactgtttaacctcaagaaggaagatgatgtcaggacctatgtcaacacttaccgccgcaagttcacaaacaagaagggcaaggaagttagcaaagcccctaagatccagaggcttgtgaccccattgactcttcagaggaagagagctagaattgctgacaagaagaagaaaattgctaaggctaattctgatgctgctgattaccagaagcttctcgcctcgaggttgaaggaacagcgtgacaggaggagtgagagtttggcaaagaagaggtcgagactctcttctgctgctgccaagccctctgtcacagcttaaaaaagcttgagaatcaaatcaaagatgtcacctttctagttttgttctcttttcttctccggctattaaaaagttagttcgagttcatattcagctgtttttgttccaagacatgggtacacaatcgctttgggcttgtttcatgatttatgcttttagttgaagaccattttaaactcaatttttattgcttatctttctcagtttttgatcaaagcgtttctccattgaaaaccattttaatcacctgtttcaatcatacataatgttaaacacatgtactggcgattacaataggtatatattttgactgaaatttatggagca

SEQ ID NO: 391 - DNA, 3147 bp, Arabidopsis thaliana
  source 1..3147: mol_type = genomic DNA
aatggagttgccatggaggttgaggtaatttgtagctcgaatgcatctgatcatgcagttagtatagataatctgtggatattttgcaatattcgtagggaaaaggaaccaaaaatccatcaagttgtaagtgtttagcaaatatctacaagacttcatcttttgtgctttctcttaaatgtatccgatttttttttgcatttgaaagttctacaatattattagagtagtgggaaatgtcataatcgtggaaaagtataaatattttcaataatgcatacagtaatcattgattccctttgtgtggttgaaattctattctatacatctttaaattcgatatagtaatcatttattccctatctcttcttttcatcattttgaataattgtcactcactcaatttggtttcttgttttgctctctagatctctcttttctctcttctttccatctccagcaatgggagcttgtttaacactctcgttctcttgtgatgaagttgtgaatcaaatctctcaaggtttatgcatcaacgtgggttatatttgcgagctctccaagaatgtagtggctatgaagaaagacatggaagtgctgaagaaaaagcgagatgatgtgaaaagaagggtagatatagaagagttcacaaggcgtcgtgaaaggctttctcaagtccaaggatggcttacgaatgtctcgaccgtcgagaataaattcaatgaactgcttaccactaatgacgctgagcttcaaaggttgtgtctctttggattttgctctaaaaatgtgaaaatgagctatctttatgggaaaagggttgtcctgatgttgaaggagattgagagtcttagttctcaaggagattttgatactgtgactttagccactccaatagctaggattgaagagatgcctattcaacctacaatcgtaggtcaggaaacaatgctcgaaagggtatggacccgtctcacagaagacggagacgagattgtgggtctttatggcatgggtggagtaggcaaaaccacccttctcacacgaatcaacaacaagttttctgaaaaatgtagcgggtttggggttgtgatatgggtggtggtgtctaagagtccagatatccataggattcaaggagacatcgggaagagactagaccttggaggcgaagagtgggataatgtaaatgaaaaccagagagcccttgacatatacaatgtccttgggaaacaaaaatttgtgttgttgttggatgatatatgggagaaagtgaatttagaagtgcttggagtcccttatccaagcagacaaaatggatgcaaagtagtattcaccactcgttctagagatgtttgtgggcgtatgcgggttgatgacccgatggaagtcagttgcctagaacccaacgaagcctgggaattgttccaaatgaaagttggagaaaacacattgaaaggccatccagacattcctgaacttgcaagaaaagttgctggaaaatgttgtggcctaccattggcacttaatgtcattggcgagaccatggcatgcaaaaggatggtacaagaatggcgtaacgcaattgacgttttgagctcatatgctgcagaattccctggtatggaacaaattcttcctattctaaagtatagctatgataatttaaacaaggagcaggtgaaaccatgtttcctatattgctctctgtttcctgaagattatcgtatggaaaaagagaggttgatagactattggatatgtgagggattcatagatgaaaatgaaagtagagaaagagcattaagccaaggttatgagatcattggtatccttgtccgagcatgtttgttgttggaggaagctatcaataaagaacaagttaaaatgcatgatgtggttcgggagatggctctatggattgcatctgatcttggggaacataaagaaagatgtattgtgcaagtcggtgttggattacgtgaggtaccgaaagtcaagaactggagttctgtgagaaggatgtcgctgatggaaaatgagattgaaattttatctggcagtcccgaatgcctggaacttacaactctgttccttcagaaaaatgattcattgctacatatctcggatgaattcttccggtgtatcccaatgctagttgttttggatctatcagggaattcaagtctccggaaattgcctaaccaaatatcaaagttagtctccttgcgttatcttgacttgtcgtggacatacattaagcggctacctgtcggtctacaagagttgaaaaagctcagatatttgagattggattacatgaagagacttaagagtatttcagggatatcaaatatatcaagtttgaggaaattgcaacttttacagtctaaaatgtcgctagacatgagcttagtggaggagttgcagctattagaacatttagaagttctaaacataagtatcaagtcaagcttggtagtggagaagttgttaaatgctcccaggttggtgaaatgtcttcaaatcttagtacttagaggagttcaggaagaatcatccggagtattgactttgccagatatggataatctcaataaagtcatcataaggaagtgtggaatgtgtgagataaagatagagaggaaaactttatcattatcatcgaacagaagtcccaaaactcaattcctccataacctctccactgtgcatataagtagctgtgatggtctgaaggatttgacgtggttgttgttcgctcctaacctcactagtctcgaggttctggactcggaactagtagaaggaataataaaccaagagaaagctatgactatgagtggtatcattcctttccagaaactagagagtctacgcctacacaatctagcgatgttgaggagcatctactggcaacctctgtcttttccatgtctgaagacaattcacataacgaagtgtcctgagctgagaaagcttccattggattctgaaattgccataagggatgaagaacttgtcattaagtaccaagaggaagaatggcttgaaagggttgaatgggacaacgaagccacaagactccgtttcttaccttttttcaagttctttggacctgaatggcaagttagttatgtgcggtag

SEQ ID NO: 392 - DNA, 3034 bp, Arabidopsis thaliana
  source 1..3034: mol_type = genomic DNA
caaaaaaacaaagaaggattataagctatacttacttttcagcttctctcatggaagaatcttcatctttgtcattgcagtcttgcaattggagacaccatgtgtttccaagcttcagcggcaaagatgtccgcagaacctttctcagccaccttctcaaggagttccggcgtaagggaatccgtactttcatagataatgatatcaagagaagccaaatgatcagttctgagcttgtacgagctatcagagaatctaggattgcggttgtagtgttgtcgcggacctatgcatcttcaagctggtgtttgaatgagttggtggagataaagaaagtaagccagatgatcatgccggttttctacgaggtggatccatctgatgtgaggaaacgaacgggagaatttggaaaggcgtttgaggaagcatgtgaaagacaaccagatgaggaagtgaagcagaaatggagagaagcattggtctatatagctaatatagccggcgagtcttctcaaaactgggacaatgaagcagatctgattgacaagattgctatgagcatttcatatgaattgaattctacattatcacgagattcctacaatctggttggaatcgacaatcatatgagagagctggattctttgttatgtctggaatcaactgaagtgaaaatggtggggatttggggtcctgcaggtattggcaagacaacaattgccagagctttattcaaccggctatctgaaaacttccaacacactatttttatggagaatgttaagggaagttctaggacctcggagctcgatgcctatggcttccagttgcgtttgcaagaacagtttctgtctgaagttattgatcataagcatatgaagatacatgatttaggtttggtaaaagaaagattgcaggatctgaaagttcttgttgttcttgatgatgttgataaactagaacaacttgatgccttagtgaaacaatctcagtggtttggttctggaagtaggatcattgtgaccacggaaaacaaacagctattgagagcgcatgggatcacttgcatatatgagttgggttttccatctagaagtgattctcttcagattttctgccaatatgcatttggagagagttctgcaccagatggttgtatcgagcttgctactgaaataacaaagcttgctggctatcttcccctagctctaaaggttttggggtcctctctgcgagggatgagcaaagatgagcaaaaatcagcattgcctcgactcagaaccagtcttaatgaggatattagaaatgttttacgagtcggttatgatggtatacatgacaaggataaggtcatattccttcatattgcttgtttattcaatggtgagaacgttgattatgtgaagcaaatacttgcaagttctggcttggatgtcacatttgggcttcaagtccttaccagtaggtctctcatacacatatcgagatgcaatcgtactattacgatgcacaatttgctagaacaattgggtcgagaaattgtttgcgaacaatctattgccgagcctggcaaacgtcaattcttgatggatgcttcagagatttatgatgtacttgctgataacactggtactggagctgttttgggcatatctttggacatatctaagatcaatgagttgtttctgaatgaaagagcttttggtgggatgcataatctgttgtttctaagattctacaagtcctcttcgagtaaagatcaacctgagcttcatttacctcgaggcttggattatttaccccgtaaacttaggctgctgcattgggatgcattccccatgacatcaatgcctctgagtttttgtccacagtttcttgttgtgataaacataagggagagccagcttgagaagctgtgggaaggaacacaacctcttagaagtctaaagcagatggatttaagtaagtctgagaatctaaaagagattcctgatctttcgaaagcggtaaatatcgaggaactctgtctcagttattgtggaagtttggtgatgttaccttcctcgatcaagaacctcaacaaattggttgttcttgacatgaagtattgctcaaagctagagattatcccctgcaatatggacttagagtcccttagcatcctcaatcttgatggatgctcacgattggagagttttccagaaatttcttcgaagattggatttctctctctgtcagaaactgcaatagaagaaattcccacaacagtcgcgtcttggccatgtctggcagcattggacatgtcaggctgcaagaacctcaagacgtttccatgtcttccaaaaactatagaatggttggatttgagcaggacagagatcgaagaagttcctttgtggatcgataaactctcaaagctcaataaactattgatgaacagctgcatgaagctaagaagcatctcttctgggatctctacgctggaacatatcaaaacactagattttttggggtgcaagaatattgtgagctttcctgtagagatattcgagagctctcggttctgtcataatctggtgatggagatgagaaacattcaaaaccctgatcttcctcgaccattttatttcaagaacaactatattgacactattccagattgtattacacgtcactgcaagctgccttttctgaattcatcaggatcaatctccagcaagatagagaatgatttcatctggttcgataaataaatatcagtgaagaattgcatgataatgatgagtcagatggagtttcatcttcaaaccctgctcattacaattgtaagtgacatcatttgacttttcccctgtggacccatctttgggcactgcaagtgttccagaccatatagttcaacatctctgaaactgagaatgaaatccgtgtacgttgggcacgttattattgttgaaatgtaggttcttgtaagatatagcttatagacaattgtttgtatatccgtgtacgttgggcacgttattattgttga

SEQ ID NO: 393 - DNA, 3099 bp, Capsicum chacoense
  source 1..3099: mol_type = genomic DNA
caaatatttcttggagtgaatttgaagttgtattatctgcaattgaatggttggtcatagtcgcaaaggacaaaaacgagaatacagtatatatggctcatgcaagtgtggcttctcttatgagaacaatagaatctctcttgacattcaattcgccgatgcaatctctatcctgtgatcacagagaagaactttgcgctcttcgtgaaaaagttagttccctggaagtatttgtcaagaactttgagaaaaacaatgtttttggggaaatgacggattttgaagtagaggtaagagaagttgcaagtgctgctgaatacacaattcaactgagactaacaggaactgtactgggagaaaataaaagccagaaaaaaaaggcgcgtcgaaggtttcgtcaaagcctgcaacaagtagcagaggacatggatcatatctggaaagagtcgacaaagatccaagataaaggaaaacaagtatcaaaggaatcattggttcatgatttttcaagttcaacaaacgatattttgaaggttaagaacaatatggttggacgtgatgatcaaaggaaacagttgttagaagatctgactagaagctactctggggaacccaaagtcatcccgattgtcgggatgggaggcataggtaaaacaaccttagcaaaagaagtttacaatgatgaatcaattctatgccgttttgatgttcatgcctgggctaccatatctcaacagcacaacaaaaaggaaattttgctgggccttctgcattccacaatcaaaatggatgacagggttaagatgattggtgaagcagagctagcagacatgttacagaaaagtttaaagagaaagaggtacttaattgtcttggatgatatctggagttgtgaagtgtgggatggcgtgagacgatgctttccaactgaagacaatgcagggagtcgaatactgttgactacccgtaatgatgaagtagcttgttatgctggtgtagagaatttttctttgcggatgagcttcatggatcaagatgagagttggagtcttttcaaaagtgcagcattttcaagtgaagcattaccatatgagttcgagactgttggaaagcaaatcgcagatgaatgtcacgggttaccactaactattgtcgtggttgcagggcttctcaaatctaaaaggacaatagaagattggaaaactgttgctaaagatgtcaagtcattcgtcacaaatgatcctgatgaacgatgttcacgtgtgcttgggttgagttacgatcacttgacaagcgatctaaaaacatgtcttctgcatttcggaatttttccagaagacagtgatattccagtgaagaatttgatgagatcatggatggctgaggggttcctgaagttggaaaatgatttggaaggagaggttgagaagtgtttgcaagagcttgtcgatagatgtctagtcctcgtcagcaagagaagtcgagatggaacaaaaattagatcatgtaaggttcatgatctaatatatgacctgtgcgtgagagaagttcaaagggagaacatttttatcatgaacgacattgttcttgacgtatcatatccagaatgttcatatctctgtatgtataaaatgcagccctttaagcgcgtgactggtgatgaaattaattattgtccctatggtctttatagggctcttcttacccctgtaaatcgtcagttgagagatcatgacaacaacaatcttttgaaacgaacccattctgttttctcttttcatcttgagcctttatattatgttctcaaatcagaggttgttcatttcaaattactcaaagtcttggagctgagacacagacagattgatggtttccctcgagagatactaagcctcatctggttgaggtacctatcattgttcagctatgggaatttcgatgtacctccagaaatttgcaggttatggaatctgcagacattcattgttcaacggtttcgatcagatataataatttttgctgaggaaatttgggaactaatgcaattaaggcatcttaaactgcccagattttatttgccagattgcccaagtggatctgttgacaaaggaaggcacttggatttttcaaacttacaaactatttcttacttgtctccacgttgttgcacgaaggaggttattatggggattcagaatgtcaaaaaattaggaatcagtggaaataaggatgactataaaagttttcgggactctgggcttcccaacaatcttgtctatctgcagcaacttgaaatattgagtcttatatctgttgattatagccttttgccagtgatcatttcaagtgcaaaagcttttccagcaacgctcaagaagttgaagttggaaagaacttatctaagctggtcatacttggacatcatagctgagttgcctaaccttgaggtgctgaagctgatggatgacgcttgttgtggtgaagaatggcatccaattgttatgggatttaatcgattgaagcttttgctaattaaatatagttttctcaagttctggaaagccacaaatgacaattttcctgtccttgagcgcctcatgattagaagttgcaaaaatttgaaagagatacccattgagtttgcagatatacacacactacagctgattgagttaagagagtgtcctcccaaacttggggaatctgctgcacgaattcagaaagaacaagaagacctcggaaacaaccctgtggatgttcgtatctcaaatccattgaaggagagtgattctgattcagaagaacattaggaaaggatctcaaggccagaaggattgaactcttgggatttcatttcggccctctatcacaaaataccactaaattatcggtttcaagcaatgtgtgacttccaaggagatgtgatatcttttgtgttgtaacatatttttgagttgtactgattcccttcttcccttctctttttatgtaactttactaattcaacttcaagtactagcagaccacatggttgattgtgatcgagtttgatgattattttatacgatgagacaaccagtttagttttaaaaaaaaaaa

SEQ ID NO: 394 - DNA, 4010 bp, Glycine max
  source 1..4010: mol_type = genomic DNA
aatacagctgttaaagtttgtcttgttgggaacactcaacagttattggttgactcaatcttaattaaagccatccttcataaaattgcctatcactgatttgatcagttcatgaaccctgcactgcacttcaaattactcattttcattcatccactcaactccctttcctaccatggcactagaattggttggtggtgctcttctttctgctttccttcaggttgcgtttgagaagcttgcttctcctcaagttctggacttctttcgtggaagaaagcttgatcaaaagctgctcaacaacttggaaatcaagctgaactccatacaggctctggctaatgatgcagaactaaagcagttcagagatccacttgtcagaaactggcttcttaaggtcaaagatgctgtgtttgacgcagaggatatcttggatgaaatacaacatgagatctccaaatgccaggtcgaagctgaagctgaagctgagtctcaaacctgcacttgcaaggtaccaaatttcttcaaatcttctcctgctagttcctttaacagggaaattaaatccaggatggaagaaatccttgatagattagatcttctctcaagccaaaaggatgatctaggcttgaaaaattctagtggtgttggcgttggatcagaattgggtagtgcagtaccacagatatcacaatcaacatcttcagttgttgaaagtgatatttatggcagagataaagacaaaaaaatgatttttgattggctgacatctgacaatggcaatcctaaccagccatcgatactttctattgtgggcatgggtgggatgggtaagaccacacttgctcaacatgtattcaatgaccctaggatcgaggaggctagatttgatgtcaaagcttgggtctgtgtttcagatgattttgatgctttcagggtaacaagaacaattcttgaggccatcactaaatcgactgatgatagtagagacctagagatggttcacggaagattgaaagaaaaattgacggggaagagatttcttcttgttttggatgacgtttggaacgaaaaccgacttaaatgggaagctgtgctaaaacatcttggttttggggctcaggggagtagaattattgccaccacacgtagtaaggaagttgcttctaccatgaggtcaaaagaacacctcctggagcaattacaagaagatcattgctggaagttgtttgctaaacatgcattccaagatgataatattcaaccaaatccagattgcaaggagattggtatgaagatagttgaaaaatgtaaaggacttcctctggccttgaaaacaatgggaagtctattacacaacaagtcatctgttacggaatggaaaagcatattgcagagcgagatatgggaattttcaacagagcgtagtgatattgtacctgctttagcactaagctatcaccatcttccttctcatctcaagagatgttttgcttattgtgccttattccccaaagattatgagtttgataaggagtgcttaatacaattgtggatggctgaaaaatttctacaatgttctcaacagggtaagagtccaggagaagttggtgaacaatacttcaatgatctattatcaaggtgcttctttcaacaatcaagcaacacagagagaacagattttgtcatgcatgaccttctcaacgatttggcaagatttatttgtggggacatttgtttcagattggatgggaatcaaacaaaaggtacaccaaaagcaacccgtcattttttaattgacgttaaatgttttgatgggtttggaactctatgtgacacaaaaaagttacgtacttatatgccaacaagttacaaatattgggattgcgagatgtcaatacacgaattgttctccaagtttaattacttacgtgtcttatctctgtttgattgtcatgacctaagagaggtgcctgactctgtgggtaatctcaaatatctccgttcgttagacttatccaatactaaaatagaaaaactacctgaatcaatatgttcactctacaacttgcaaatactgaagctaaatggttgtagacatttgaaggagctgccctcaaatttgcataaactcactgatttgcatcggcttgaattaatagaaactggagtgagaaaggtaccagcacatttgggaaaactggagtatcttcaagtattaatgagttcgtttaatgttggcaaaagtagggagttcagtatccagcagttaggagaactcaatcttcatggaagtctatcaataaggcaactgcagaatgttgagaatccatcagatgcattagcggtggatttaaaaaataaaacacaccttgtcgaggtagagttagaatgggattcagactggaaccctgatgattcaacaaaagaaagggatgtaatcgagaatctacagccttccaaacacttggagaagttgaggatgaggaactatgggggtactcaatttccaaggtggttattcaacaattcatcatgtagtgtggtgtccttaaccttgaagaactgtaaatattgcctatgtttgcctccccttggacttttgccatctctgaaggaactttcaattaaagggcttgatgggatcgtgagtatcaatgctgattttttcgggagtagctcttgttcatttacatccttgaaatctttggagttctaccatatgaaggaatgggaagaatgggaatgtaaaggtgtgacaggtgcttttccacgtcttcaacgtctttctatagagcgttgtcccaagctgaaagggcacttgccagagcaactatgtcatttaaattctctaaagatttctgggtgtgaacaacttgtaccttctgctctcagtgcccctgatattcataaattatacctaggagactgtggagagctgcaaattgatcatgggacaactttgaaagagcttaccattgaaggtcacaacgtggaggcagccttattcgaagagattgggcgcaattactcttgttcaaataacaatattcccatgcacagttgctatgatttccttgtaagcttgcgcatcaaaggtggctgcgactctttaacgacctttccgctagatatgttcacaatactcagggaactttgtatctggaagtgtcctaatctacggaggatttcacaagggcaggctcataatcatctccagactctggatatcaaagagtgcccccaattagaatcattgcctgaaggaatgcatgtcctccttccatctcttgattctctgtgcatagatgattgtccaaaagttgaaatgtttcccgaaggaggtttgccatcaaatttaaaagaaatgggtctctttggtggtagttacaaacttatctccttattgaaaagtgccttgggaggcaatcactctctagaacggttagttattggaaaagtggattttgagtgtcttcctgaggaaggtgtactgccacactctcttgtttctctacagatcaatagctgtggagatcttaaaagactggactacaaaggtatctgccacctctcctctctcaaggaattgagtcttgaagactgccccaggctccaatgcttaccagaggagggtctgcccaaatccatttcaactttgtggatttggggggactgtcagttgctcaaacaacgttgccgggaacccgaaggcgaagactggccaaagattgctcacttttgcccgttgctcaatcaacgttgccgggaacccggaggcgaagactggccaaagattgctgacattgaaaacgtgtatataaggtagtgaggttgattataaagaataatggtgaaagatgtagatgcttctctattgcctgcaatttactaaataattgttttctaaacttatttttgctttctgcttgctggacgccgccgctcagttatttattattcgacaaaataattgtttaatatagtttcaagtgattgattctgcttgg

SEQ ID NO: 395 - DNA, 3639 bp, Glycine max
  source 1..3639: mol_type = genomic DNA
atggcagtagaattaattgctggtgctcttctttcttctttccttcaggttgcattcgaaaagcttgcttctcctcaagttctccacttctttcacggaaaaaaacttgatgagacgcttctgagaaagttgaaaattaagctgctgtccatcgatgctctggctgatgatgctgaacgaaagcagttcgcagatccacgcgtgagaaactggcttcttgaggtcaaagatatggtttttgatgcagaggatctcttggatgaaatgcaatatgaattctccaaatgggaactggaagctgaatctgaatctcagacctgtaccggctgtacttgcaaggtaccaaatttcttcaaatcttctcctgctagttcctttaacagggaaattaaatccaggatggaaaaaatccttgatagcttagaatttctctcaagccaaaaggatgatctaggattgaaaaatgctagtggtgttggcgttggatcagaattgggtagtgcagtaccacagatatcacaatcaacatcttcggtggttgaaagtgatatttatggcagagataaagacaaaaaaatgatttttgattggctgacatctgacaatggcaatcctaaccagccatcgatactttctattgtgggcatgggtgggatgggtaagaccacacttgctcaacatgtattcaatgaccctaggatccaggaggctagatttgatgtcaaagcttgggtctgtgtttcagatgattttgatgctttcagggtaacaagaacaattcttgaggccatcactaaatcgactgatgatagtagagacctagagatggttcacggaagattgaaagaaaaattgacggggaagagatttcttcttgttttggataacgtttggaacgaaaaccgacttaaatgggaagctgtgctaaaacatcttgtttttggggctcaggggagtagaattattgccaccacacgtagtaaggaagttgcttctaccatgaggtcaagagaacacctcctggagcaattacaagaagatcattgctggaagttgtttgctaaacatgcattccaagatgataatattcaaccaaatccagattgcaaggagattggtacgaagatagttgaaaaatgtaaaggacttcctctggccttgaaaacaatgggaagtctattacacgacaagtcatctgttacggaatggaaaagcatattgcagagcgagatatgggaattttcaacagagcgtagtgatattgtacctgctttagcactaagctatcaccatcttccttctcatctcaagagatgttttgcttattgtgccttattccccaaagattatgtgtttgataaggagtgcttaatacaattgtggatggctgaaaaatttctacaatgttctcaacagggtaagagtccagaagaagttggtgaacaatacttcaatgatctattatcaaggtgcttctttcaacaatcaagcaacacaaagagaacacattttgtcatgcatgaccttctcaacgatttggcaagatttatttgtggggacatttgtttcagattggatggtgatcaaacaaaaggtacaccaaaagcaccccgtcacttttcagttgcaatcgaacacgttcgatactttgatgggtttggaactctatgtgatgcaaaaaagttacgttcatatatgccaacaagtaacaaaaagatttttgattacttctcttcttgggatcgcaatatgtcgatacatgaactggtctccaagtttaagttcttacgtgtcttatctttatctcattgttctaacctaagcgaggtgcctgactctgtgggtaatcttaaatatctcagttcgttagacttatccaatactgaaatagtaaaactacctgaatcaatatgttcactctacaacttgcaaatactgaagctgaattattgtaaacaattggacgagctgccctcaaatttgcataaactcactgatttgcatcgccttgaattaatagatactggagtgagaaaggtaccagcacatttgggaaaactgaagtatcttcaggtatcaatgagtccgtttaaggttggcaaaagtagggagttcagtatccagcagctaggagaactcaatcttcatggaagtctatcaattcagaacctgcagaatgtcgagagtccctcggatgcattagcagtggatttgaaaaataaaacacaccttctggaggtagagttagaatgggattcagactggaaccctgatgattcaacaaaagaaagggatgaaattgtaatcgagaatctacagcctcccaaacacttggagaagttgaggatgaggaactatgggggtaaacaatttccaaggtggttattaaacaattcattattgaatgtggtgtccttaaccttggagaactgtcaatcttgccaacgtttgcctccccttggacttttgccatttctgaaggagctctcaattcaagggcttgcagggattgtgagtattaatgctgattttttcgggagtagctcttgttcatttacgtccttggaatctttgatgttccacagtatgaaggaatgggaagaatgggaatgtaaaggtgtgacaggtgcttttccacgtcttcaacgtctttctatagagtattgtcccaagctgaaggggcacttgccagagcaactatgtcatttaaatgatctaaagatttatgggtgcgaacaacttgtaccttctgctctcagtgcccctgatattcatcaattatccctaggagactgtggaaagctgcaaattgctcatccgacaactttgaaagagcttaccattacaggtcacaacgtggaggcagccttactcgaacagattggacgcagttactcttgttcaaataacaatattcccatgcacagttgctatgatttccttgtaaggttggtcatcaatggtggctgcgactctctaacgaccattccactagatatgttcccaaaactcagggggcttgatatcgggaagtgtcctaacctacagaggatttcacaggggcaggctcataatcatctccagagtctgtatatcaaagagtgcccccaattagaatcattgcctgaaggaatgcatgtcctccttccatctcttcattatctgagcataagggattgtccaaaagttgaaatgtttcccgaaggaggtttgccatcaaatttaaaaggtatgagactccatggtagttacaaacttatgtcctcattgaaaagtgccttgggaggcaatcactctctaattagcttatatattggaggagtggatgttgagtgtcttcctgacgaaggtgtactgccacactctcttgtttctctatggatcagtgactgtgaagatcttaagagactggactacaaaggtctctgccacctctcctctctcaagaacttgtttctttatgactgccccaggctccaatgcttaccagaggagggtctgcccgaatccatgttatctttgcacatttacgattgtccgttgctcatacaacgttgccgggaacccgaaggcgaagactggccaaagattgctcacattgattataaagaatttaatggtgaggttgattataaataa

SEQ ID NO: 396 - DNA, 3306 bp, Hordeum vulgare
  source 1..3306: mol_type = genomic DNA
atggtgagcgccttggcaggggtgatgacctctgtcatcggcaagctcaccgccctgctcggggaggagtacgcaaagctgaaaggtgtgcacagggaggtggagttcatgaaagatgagctgagcagcatgaacgcgctccttcagaggctggcagaggcggaccgtgatcttgatgtgcagacgaaggaatggagggaccaagttcgggagatgtcttacgacattgaggattgcatagacgactttatgaaaagccttggccaaactgacagtgctcagacagcagggcttgtgcaaagtgtggtccagcagctcaaggcgctgagggcgcgccatcaaatatccagcaaaatccaggggctcaaggcacgtgttgaagatgcaagcaagcgacgtatgaggtataagcttgatgagcgcaccttcgagcctagcatctcaagggctatcgaccctcgtttgccttcactctatgctgagcctgatgggcttgtcggtattgacaagccaagagacgagctcattaagtgcctaatggaggggatgggtgcatcagtgcagcagcaaaaggtgttatctattgtgggtcctgggggtctcggtaaaactacacttgccaatgaggtgtaccgtaaactggaaggccagttccagtgtcgagcttttgtttccttgtcacaacaaccagatgtgaataagatcttaagaaatatactctctcaagtctgccagcaagagcttcctagcacaagtgtacaggacgagggaaaactcattgacgcaatcagagaagttttaaagaacaagaggtacattcaccaactttgaattagttggctgttggtactgcatcattttttcttcagcattgatgcttatttagtagcctagccattctactatagtctactgttgtttaattaaattaaatatagatgattttgtttcattttaagcatatatatgcaattgtgaatagtgctttgattcacagttcatgaggttatctatctaaagggctcaaaagacttcctttaaatatcgtaaccccctatgataaattcaactttttgtggtgtggccaaaccattggggaaggggataatggctgtctgtaatagtaatatatagaagagaaatgattctgtccccataaacagtgaatttcaagaaacctgaagccctatatcattctcatgatttactaacatttgacgacaaggaaacatgccattttatttatttgttcacatattttccttattcatgagatttgcaaaacatgcactttgcaggtacttagttgttattgatgatatatggagtactcaagcatggaagattatcaaatgttctttgtttctgaatgacctgggaagcagaataatgacgacaacacgtagtattgatatagccaagtcatgttgctctcggcgccatgatcgtgtctatgaaataatgcctctgacgacagccaactctaagggtttattttttaaacgaatatttggctcagaagatatatgtcctcctcaattggaagaaatctcctcggaaatattaaaaaaatgtggtggttcaccattagcgattcttacaatagcaagtttattggccaataaagatagcacaaatgaagaatggaagtgggtgtataattcgatcggttcgacactgggaaaggaccccggtgtagaagagatgagaaggatactatctcttagctacgatgatcttcctcaccatttgaagacatgtttattgtatctgagtatatttccggaggactatgagattgagagggatcgattgataaggaggtggatcgctgaaggattcattgatacagatggtggacgagatttggaggaaataggagagtgttattttaatgatcttatcaatagaagtatgcttgagccagtgaaaatccaatatgacggtcaagtcgtttcatgccgagtgcatgatatgattctggatctccttgcatctaagtcaattgaagaaaactttgccaccttctctggtaaccaaaatgagatattagtccttcggcataagatccgtaggctatctctcaattattatgccctagagcacaccatgcttccatcaacagcgatcatttctcattgccgttcgctcagtattgtcgggtatgctgaaaagatgccttctctttcgaagtttcgtgttctgcgagtacttgatattgagaatggtgaggagatggagagcaactgttttgagcatctaaggacgcttttccagttgaggtatttgcgactccacgttagaagtatttctgcactccctgagcagttaggagaactacagcatttgaggactctggatatgggctggacaaagatcacaaaaatgcccaaaagcattgttcagctgcaacatttgacatgtttgcgcgtcagtaatttggaattacctgaagggattgggaatctgcaagctctgcaggagctatcagatatcaaagtcaaccggcacagcacggcgtcttgtttgctggagctgggcagtctgaccaaactgaaaatccttgggctacgctggtcaattgtcagtacacacggtaacgaagacacttttgtggataacttggtatcctcgctgcgcaaactgggcagatccagccttcgatccatatgcattcgtagttatcatggctataccatggagttcttactggactcctggttcccctcccctcatctcatgcaaaagtttcagatgggcacgtactacaacttccccagagttcctccttggatcgcgtcgctggacaagctcacatacctagatatcaatatcgatccagtagaagaggaagcactggagatccttggagaattgccttctttgctgtttctctggctgacatcgaaatcggctgctcccaaacagcggctcgtcgtaagcagcagcatgtttgtgcgtctgaaggagctccacttcacctgctggagcaatgggcaaggactgatgtttgaggccggggccatgccgaggctcgagaagctgtgggttccgtttgacgcaggcagcggtcttgattttggcatccagcacctctcttccctcacgcatcttgccgtcgagatcatttgcgtcggcgcgaccgctcgggacgtagaggcgttggaggaggccatcagaggtgcagcccgtctccttccgaaccgccctgcggtggaattccgaacatgggatgatgaaaagatggtggtggaggaggaggaggggcaaggcgtccctgaagaggagatccacgctagcggttga

SEQ ID NO: 397 - DNA, 3306 bp, Hordeum vulgare
  source 1..3306: mol_type = genomic DNA
atggtgagcgccttggcaggggtgatgacctctgtcatcggcaagctcaccgccctgctcggggaggagtacgcaaagctgaaaggtgtgcacagggaggtggagttcatgaaagatgagctgagcagcatgaacgcgctccttcagaggctggcagaggcggaccgtgatcttgatgtgcagacgaaggaatggagggaccaagttcgggagatgtcttacgacattgaggattgcatggacgactttatgaaaagccttggccaaactgacagtgctcagacagcagggcttgtgcaaagtgtggtccagcagctcaaggcgctgagggcgcgccatcaaatatccagcaaaatccaggggctcaaggcacgtgttgaagatgcaagcaagcgacgtatgaggtataagcttgatgagcgcaccttcgagcctagcatctcaagggctatcaaccctcgtttgccttcactctatgctgagcctgatgggcttgtcggtattgacaagccaagagacgagctcattaagtgcctaatggaggggatgggtgcatcagtgcagcagcaaaaggtgttatctattgtgggtcctgggggtctcggtaaaactacacttgccaatgaggtgtaccgtaaactggaaggccagttccagtgtcgagcttttgtttccttgtcacaacaaccagatgtgaataagatcttaagaaatatactctctcaagtctgccagcaagagcttcctagcacaagtgtacaggacgagggaaaactcattgacgcaatcagagaagttttaaagaacaagaggtacattcaccaactttgaattagttggctgttggtactgcatcattttttcttcagcattgatgcttatttagtagcctagccattctactatagtctactgttgtttaattaaattaaatatagatgattttgtttcattttaagcatatatatgcaattgtgaatagtgctttgattcacagttcatgaggttatctatctaaagggctcaaaagacttcctttaaatatcgtaaccccctatgataaattcaaccttttgtggtgtggccaaaccattggggaaggggataatggctgtctgtaatagtaatatatagaagagaaatgattctgtccccataaacagtgaatttcaagaaacctgaagccctatatcattctcatgatttactaacatttgacgacaaggaaacatgccattttatttatttgttcacatattttccttattcatgagatttgcaaaacatgcactttgcaggtacttagttgttattgatgatatatggagtactcaagcatggaagattatcaaatgttctttgtttctgaatgacctgggaagcagaataatgacgacaacacgtagtattgatatagccaagtcatgttgctctcggcgccatgatcgtgtctatgaaataatgcctctgacgacagccaactctaagggtttattttttaaacgaatatttggctcagaagatatatgtcctcctcaattggaagaaatctcctcggaaatattaaaaaaatgtggtggttcaccattagcgattcttacaatagcaagtttattggccaataaagatagcacaaatgaagaatggaagtgggtgtataattcgatcggttcgacactgggaaaggaccccggtgtagaagagatgagaaggatactatctcttagctacgatgatcttcctcaccatttgaagacatgtttattgtatctgagtatatttccggaggactatgagattgagagggatcgattgataaggaggtggatcgctgaaggattcattgatacagatggtggacgagatttggaggaaataggagagtgttattttaatgatcttatcaatagaagtatgcttgagccagtgaaaatccaatatgacggtcaagtcgtttcatgccgagtgcatgatatgattctggatctccttgcatctaagtcaattgaagaaaactttgccaccttctctggtaaccaaaatgagatattagtccttcggcataagatccgtaggctatctctcaattattatgcccaagagcacaccatgcttccatcaacagcgatcatttctcattgccgttcgctcagtattgtcgggtatgctgaaaagatgccttctctttcgaagtttcgtgttctgcgagtacttgatattgagaatggtgaggagatggagagcaactgttttgagcatctaaggacgcttttccagttgaggtatttgcgactccacgttagaagtatttctgcactccctgagcagttaggagaactacagcatttgaggactctggatatgggctggacaaagatcacaaaaatgcccaaaagcattgttcagctgcaacatttgacatgtttgcgcgtcagtaatttggaattacctgaagggattgggaatctgcaagctctgcaggagctatcagatatcaaagtcaaccggcacagcacggcgtcttgtttgctggagctgggcagtctgaccaaactgaaaatccttgggctacgctggtcaattgtcagtacacacggtaacgaagacacttttgtggataacttggtatcctcgctgcgcaaactgggcagatccagccttcgatccatatgcattcgtagttatcatggctataccatggagttcttactggactcctggttcccctcccctcatctcatgcaaaagtttcagatgggcacatactacaacttccccagaattcctccttggatcgcgtcgctggacaagctcacatacctagatatcaatatcgatccagtagaagaggaagcactggagatccttggagaattgccttctttgctgtttctctggctgacgtcgaaatcggctgctccgaaacagcggctcgtcgtaagcagcagcatgtttgtgcgtctgaaggagctccacttcacctgctggagcaatgggcaaggactgatgtttgaggccggggccatgccaaggctcgagaagctgtgggttccgttcgacgcaggcagcggtcttgattctggcatccagcacctctcttccctcacgcatcttgccgtcgagatcatttgcgtcggcgcgactgctcgggacgtggaggcgttggaggaggccatcagaggtgcagcccgtctccttccgaaccgccctgcggtggaattccgaacatgggatgatgaaaagatggtggtggaggaggaggaggggcaaggcgtccctgaagaggagatccacgctagcggttga

SEQ ID NO: 398 - DNA, 3921 bp, Nicotiana benthamiana
  source 1..3921: mol_type = genomic DNA
atgttgacttcatcttcccatcatggacgcagttatgatgttttcctaagctttaggggagaagacactagaaaaacatttgtgggtcatctgtttaatgctcttattgaaaagggtattcacacattcatggatgataaggagttaaagagagggaagtcaatctcatctgaactcatgaaagccattggagaatcaagatttgctgttgttgtcttttccaagaactatgcttcctctacatggtgcttggaagaactggtaaagattcttgaaattcatgaaaaatttgagctaattgttgtcccagttttctatgatgtggatccatcaactgtgaggaaacaaaatggggagtatgctgtttgttttactaaatttgaagctaacttggttgatgatagagacaaagtgctaaggtggagggaagcacttactaaggtagctaacatatcagggcatgatttgcgcaacacttacaatggggatgaatcaaaatgcatacaacagatactgaaagacatattcgacaaattttgtttctctatctcaataactaacagagatttagttggaatagaatctcaaattaagaaactaagttcattgttgaggatggacctgaaaggagttcgtcttgttgggatttgggggatgggtggtgtgggaaagacaactgctgcaagagcattgtttaacagatactatcagaattttgaaagtgcttgttttctcgaagatgttaaagaatatctgcaacaccataccttgttgtatttgcagaagactctcctttccaaactgttgaaggtagaatttgtagattgtactgatactgaagaaatgtgtgtaatattaaagaggagactttgttctaagaaagttctggttgttcttgatgatgttaatcataatgaccagctggataagctggtcggagctgaagattggtttggtagtggtagtagaattgttatcacaactagggatatgaaactgttgaaaaaccatgatgtgcatgaaacgtacgagataaaggttttggaaaaagatgaagcaattgagcttttcaatttgcacgcattcaagagaagttcacctgaaaaggagtttaaggagctcttaaatcttgtggtagattatactggaggccttcctttagctcttaaggtgcttggttctctgctgtacaaggaagatcttgatgtatggataagtacgattgatagactaaaagataaccctgagggtgaaattatggctacacttaaaataagttttgatggattaagggattatgaaaaaagtatatttttagatattgcatgtttcttcaggggttacaatcaaagagatatgacagcattatttcacgcttctggtttccacccagttctaggagtaaagacccttgttgaaaaatctctcatttttattttagaggacaaaatccaaatgcatgatttgatgcaagagatgggtagacaaatcgcagttcaagaatcaccgatgagaagaatatatcgtccggaggatgtgaaggatgcatgcataggagatatgaggaaagaagcaattgaaggcttgttactcacagagcctgaacagtttgaagagggtgagttggaatatatgtacagtgctgaagctctcaaaaagacgaggaggctgaggatacttgtgaaagaatattacaacagagggtttgatgagcctgttgcctatcttcctaacagtctgctttggcttgaatggcgtaactactcttcaaactcatttccatcaaattttgaaccgtcaaagctcgtatatcttactatgaagggtagttctatcatcgaactctggaatggtgcaaagaggttagcatttttgacaactcttgatctcagttattgccacaaattgatacaaaccccagattttaggatgatcacaaatttggaaaggttgatcctgagctcttgtgatgcattggtggaagtccatccatctgttgggtttctcaagaatcttattttgttaaatatggatcattgcatatcacttgagagacttccagcaattattcaatcagaatgtcttgaagttcttgatctcaattattgctttaacttgaaaatgttcccggaagtggaaaggaatatgacgcacttgaagaaactcgacctcacttcaactgggataagagaactgccggcatcaattgagcatctcagttccctggaaaacctacagatgcattcctgcaaccaacttgtaagtctccctagtagtatttggagattcagaaatctgaagattagtgaatgtgagaaactggggagtttaccagaaattcacgggaatagcaattgtacccgtgaactcatcttaaaattagtttcgattaaggagcttcccacctctataggaaacctcacctcactaaatttccttgaaatctgtaattgcaaaactatttcgagtctctcgagcagcatatggggattgacaagtcttacaactctaaagttgttagactgcagaaaacttaaaaacttgcccggaattcccaatgccataaatcatttgtcaggacatggacttcagctccttctgacattggagcagcccacaatttatgaacgccttgacttgcttaggattattgatatgagctggtgtagttgtattagcagtctcccccacaacatttggatgttgaaatttttaaggattctgtgcatctcttactgctcgagactggagtatttaccagaaaatttgggtcacttggaacatttggaggaattacttgcagatggtactggtattttaagactaccatcttcggttgcacgtttaaataaacttgaggtcttatcattcaggaaaaagtttgcgattggaccaaaagtccaatattcatcatcaatgctcaatttacctgatgatgtttttggaagtcttggaagcttaggctcagtggtgaagttaaatcttagtggaaatggtttttgtaatttgcctgaaacgatgaatcaacttttttgccttgaataccttgatataacattttgccagaggctcgaagcattgccagagcttcccccaagcatcaaggagctatatgtagatgaacacttggccttgagaatcatggaagatttagtaattaaatgcaaggagttgaatttaatagccgtcacaaaaattgagtaccaaaatttctatcgatggttagactcaatatggtcagatgtgtcagaactgctggagaacagtcagaagcaacaactggatgatatgttgcagcttattcccttttcatatctgtcgacggctaagcgtgaggaagttcttaagattgttatccatggaacacgaattccagaatggttcagatggcaagatagaagtgccacaacgatgtcagtcaaccttcctgaatattggtacactgaaaatttcttgggattcgctatatgctgcagctgctgcttttatcattctgcacgtagttacgatgttgaatttgaggggagcatgcatcattacaattatgattccagttattggaaagagtatgaggaaccaagttatgacttttatgagagagatagcattgagattacagcaaaactaactccccgacataaaggaatgcggactgaagagctcaagaaagtctgttcattttccatgaatgtgttacgtcgtgctactgctgtccctaatatgtgctttgcattttttccatttaacagtctctgtcacatatcaaatttacaggcaaataacccaaatgactatgggatatttgaaacctgtttgagtccaggggacatccgccatcgtggaaaacaatgggggtttaatttggtgtataaagatgaaactggtggcagtgttacacacgaaatgctcataaacagatag

SEQ ID NO: 399 - DNA, 2538 bp, Nicotiana benthamiana
  source 1..2538: mol_type = genomic DNA
atggtggatgcggtggtcactgtattcttggagaaacttctgcatgttctcacagaggagagtaggtttcttactaaatacagacagcagtttgaaaaactgaagaacgagctgctattcatgcaaagctttctcaaagatgcagagaggctcaagaggaaaaacaacacccttaaaggggtcatgtcctgtttgcgagacttaatctttgaagctgaagagatacttgaggactgccagaatcaatctgcagatagcgatcgggctactacatgcttccatcctaaaaggctctctcttcgccatcaaactgggaagtgccttgctaaaatcaatgacagaatctcggagataaagcaaaacatttcaacatatcttggagtaccacttctcgaagaaggaagtatggaggcacacaataatctaatgtcaagatggacttcttccctttatgaccacactcaggtagttggtttggaaggtgacactgagaagataaaggattggctatttgaagcaagagatggtttacttaccattgcatttgtgggtatgggaggacttggtaaaaccactcttgctcagaaagtcttcaatgacaaaagggtggaggatcacttggagaggaggatttgggtgtctgtttctcaaacatttactgaggaacaagtcatgagaagcatattgaggagtttaggagatgcatgtgttggtgatgaccagtgtgaactgttaagaaaaataaaccagtaccttttgggaaagaggtttttgattgttatggatgatgtttggagctgggacaatgcctggtggcaaaaaatctatactggactgcccaaaggaaatgggagcactgttattgtaacaacgagaaatgagctagtcgctcgcaagatgggagttacagaagcaagaatacattggccaaaattcctcaatgagcactacagttggttactattccggaagattgcatttgcaggaagtgcaggtgaatgccatttccccgagttggaggacgtgggaaaggagattgtggaaaaatgcaagggtcttcctttagcaatcaaagcagtaggaggagtgatgctttgcaagccatcttactatcacgaatggaggcgtatttcaaatcatttccgtgatgaattgaaagaaaatgatgactcagtgatggcctcactacagttgagctatgatgaactccctccttacttgaaatcctgtttcctctgtttttcactatttcctgaggattgtgtcataccaaaagaccaactgatccgttggtggattggagaaggtttcatacctctgagaagtggtaggttatcgactgaagtgggagaagattgtttctcacaactatccaatcggtgtttgatagaagttgttgataaggcttacaatggtgtgatccacacatgcaaaatgcatgacatggttcgtgacttggtgatcaaattagccgaggatgatgcatttttcaccccagctgatgcaacttgtcggcatttgggtattaagagtgagatgaattggaagcaactattgagcaatcaaaaattacgagcactgctaacaaccaccaagagtggtgaagttaacaaaatccattccgacattgccaagaagctgtgcaagagtcgacacctccaagtattggatctgtcaaaatcaattttcgatgtgcctctttcaagtttgttggaaggaattggatctgctaagcagctcacttatctcagtttaagcaatacacatccaatgattggagttccagcttccatatccaagcttgaaaaattacagattttggatttcagctattgccaaaatatgaaaatgctcccctcttgcgttctgacatttgaggaacttgctgttttggatgtgaacaactgtggttcccttgagtaccttccaaaaggattaagtaggctttccaatcttcaagtattgcttgggtttaagcctgcaaaattaagccaaccaggaggttgtcgtattgctgagctcagaagcctgactcgactcagaactctcagtttaagactaaccgaaaatgaggagattggagacgatgaggggaacgcactggtagatctccaagaacttcaatttttaacaataagttgctttggcagtcaagataatggacttgcgacaaaacttggtagactttatcctccacgacaactccacgagctgattctcaaattttatccaagtaagacaagtcctgaatggcttaaccccaatctctcccccatgttgcgatatttatcaatcatctctggtgatattacacaaatgcacgagaacttctggggtgatggtagtactgcttggaaaattgagggcttaatgttggaatctttatcggatttgagattggaatggtcagcaatgcatcaagtcatgccttcgttaagaatactcaaggttagctggtgccctgagttggagtcatttccaattgaagatgcagggtttagagggggtctatggaagaaggaagaacataggaactga

SEQ ID NO: 400 - DNA, 8394 bp, Oryza sativa
  source 1..8394: mol_type = genomic DNA
tcctcgagggtatagaccatatttcccctggtttccattgatgtggcatatatcagggcccactacctcaaccatcaccacgtccagtcctttcggcctgttcgcgatgacgagctcggccaccacctcaacatcgtccatgctgcggcgatggcgaggagacagctgggacggtgaacctcatagctccgtctgttgcaacatcctctcgccatgctcacgtcgccacgacacccttgtcctcctgctccgtagcagcctcgcaagctcacgccgcggcctcgtcgaggtcctctgtccccgagccgcttctagcatcgatgagctgaggaactccccactgccgaggcgatgacgatttggcagggagggctcgattcgcccactccaattcgcagcttcacacctcccctccccctcctattcatccaccaccaacgcggataggagaagggatagaggaaggtgtgcgtggacacttacatgttggtcccatatattttttttactcggatgccacgtcagataaaacaaccgtcggtcaacatttttcgtattgcggattaggaacgtcattcatgactcgacgcagagctgagggatggcaagtgaacttattcccataaaacttccaaaagtttggaatgctcaacttgggcttctcttcggatgctgaagtgctaatgggccaaataaccaactagcccacagcccatcgaagtggaagccgacgagtccaccgtcaacgcggcagtagtaatccgagaaaacgcgggtcgcgcgaagcaatcgatcatcatcagacgattaatccacgacgaccaggagcgctgccccgagccacacgcccacacgcactggtgaatcttctcctttccacctagttttcactctgcagtctcctctcctagctactactctgccttcccatcctcgcttgttgcagccctcttgcacacgccattggccacagtccaaggactgctcctgttccgatggaggaggtggaagccggtttgctggagggcgggatcaggtggctggcggagaccatcctggataacctggacgccgacaagctggatgagtggattcgccagattaggctcgccgctgacaccgagaagctacgggctgagatcgagaaggtggatggggtggtcgctgccgtgaaggggagggcgatcgggaacaggtcgctggcccgatctctcggccgtctcagggggttgctgtacgacgccgacgatgcggtcgacgagctcgactacttcaggctccagcagcaggtcgagggaggaggtactgtctttgcatatatccgtgccttttaattaagtttgcaagctgcgttgcctgcaacaatggcgtattggcgtcagtttccaatccatgcttgtgctacagttactacacggtttgaggctgaagagacggtcggagatggagcagaggacgaggacgatattccgatggacaatactgatgtaccggaggcagtggcggcaggcagcagcaagaaacggtccaaggcatgggaacactttactaccgtagagttcactgctgacgggaaggattctaaagcacggtgcaagtactgccacaaggacctatgttgcacatctaagaacgggacatcagctttgcgcaaccatctcaatgtttgcaagaggaaacgtgtaacaagtactgaccaaccggtaaatccatcaaggtaatgctaatggagttctgaatttagtgtaaatccgttgaagtgtaaatttggcccgttacatctgcttaagatctcattctgtctctaatcttctaatagccaactcatggtcattttttttcctaatatatagtaccggtgatggtgcaccaaatgtaattagatgcaaggaaacaaaagtgaacaattgtatatatcaaatataattatatctaaaacatgagtagtgtatcaaatccaattctttcaaaaatctactatgcaaaattgagtgacaaaatctgctgccttttttttttacagaaagcaaccaattaatataagtcaaatataaaaacgctttgtagtctccaataaaatagctcattgtttcgtttatacttatgtttataaatttaaatttaaaacttaattttggagttgattttgtggttttcttttcatcctattttattttacaacatttgattttgaatagttaagaatgcgtatataaaaattttacccataagttattttttaaattgttaataaatcgtaaggataatcataagtataagtgaaacgattcgctcttcatctacttaagattgcgttatattgctgacctttctaatcgcctaaccacgatcacatgctcttccagtgccggtgagggtgcatcaaatgcaactggtaattcagttggcagaaaaaggatgagaatggatgggacttcaacacaccacgaggcagttagcacgcacccttggaacaaggctgaactttccaacaggatccaatgcatgactcatcagttagaagaggctgtaaatgaggttatgaggctatgtcgatcctcaagttcaaaccagagtcgacagggtacaccaccggccacaaatgcaacaacatcgtcttatcttccggagcccatagtgtatgggagggctgcagagatggaaaccatcaaacagctgatcatgagcaatagatctaatggcataaccgtcctgccaattgtaggcaatggagggataggaaaaaccactttggcgcaactggtctgcaaagatctggtaattaaaagtcagtttaatgttaagatatgggtgtatgtatctgataaatttgatgtagttaagattacaaggcagattttggatcatgtctccaaccagagccacgaaggaataagcaaccttgatacgcttcagcaggatcttgaggaacaaatgaaatctaagaagttcctcattgtcttagatgatgtgtgggaaatccgtacagatgactggaaaaaactactggctcctttaagacctaaagatcaggtgaattcgtcacaggaagaggcaacaggtaatatgataattttgacaactcgtatacagagtattgccaaaagtcttggaacagtacaatcaattaagttagaagctctgaaagatgacgatatatggtcactatttaaagtgcatgcttttggtaatgataaacatgatagtagtccaggcttacaggttcttgggaagcaaattgctagcgagctaaaaggcaacccactggcagcaaaaactgtgggttcactattaggaacgaatcttaccatcgatcattgggatagcattataaagagtgaagaatggaaatccctgcaacaagcttatggcatcatgcaagcgctgaagttgagctatgatcatctatccaaccccttacagcaatgcgtctcttattgttctcttttccccaagggttattctttcagcaaagcacaactaatacaaatatggattgctcaaggatttgtggaagaatccagtgagaagttggagcagaaaggatggaaatatctagctgagttggtaaattcgggtttccttcagcaagttgaaagcacacggttttcatcagaatattttgttatgcacgatcttatgcatgatttagcgcaaaaggtttcacaaacagaatatgcaactatagatggctcagagtgcacagagttagccccaagtatacgccatttgtcaatagtaactgattctgcataccgcaaggagaaatatagaaacatatctcgtaatgaggtgtttgagaaaaggttgatgaaagttaagtcaaggagtaagttgaggtcactggtattaattgggcaatatgattctcatttttttaaatatttcaaagatgctttcaaggaagcacaacatctgcgactgctgcagatcactgcaacttatgctgattctgattcatttctctccagtttggtaaattctacacatctccggtatctgaaaattgtgaccgaagaatccggcagaactttgccccgatctctaaggaagtattaccatcttcaagtactagatattggctatagatttggaattccccgtatatctaatgatataaataatcttctcagcctgcggcatcttgttgcatatgatgaagtgtgttcttccattgctaacattggtaaaatgacctcacttcaggaactaggcaattttattgttcagaataatttaagtggttttgaggtgacacaattgaaatccatgaacaagcttgtacaacttagtgtgtctcagcttgaaaatgttagaactcaggaggaggcatgtggggcaaaactgaaagacaaacaacacttagaaaagctacatttgtcctggaaggatgcatggaatggatatgacagtgacgaaagctatgaagatgaatacggcagtgatatgaatatagaaacagaaggggaggaactgtcagttggtgatgccaatggtgcccaaagcttacaacatcacagtaatataagctctgaacttgcttcaagtgaggtgctcgaaggtcttgaaccacatcacggcctcaagtatctacggatatctgggtataatggatctacctccccaacttggcttccttcttcacttacctgtctgcaaacacttcatctagaaaaatgtggaaaatggcaaatacttcctttagaaaggctagggttacttgtaaagctcgtgttgatcaaaatgaggaatgcaacagaactctcaatcccttcactggaggagcttgtgttaattgcattgccaagcttgaacacatgctcctgcacttccatcaggaacttgaactccagtttaaaggttctgaaaattaagaattgccctgtactgaaggtatttcccttgtttgagatttcccagaaatttgaaatcgagcggacgtcgtcatggttgccccatcttagcaagcttaccatctataattatcctctttcctgtgtgcacagttctctgccaccttccgcaatcagtggttatggagaatatggaaggtgtacccttccgcaatcacttgaggaactttacatccatgagtattctcaagaaactctgcagccctgcttttcagggaacctcactctcctgagaaaattacatgtactgggaaactcaaatttagtgtctctgcagctccattcctgcacagcactcgaagagttgataattcaaagctgtgagtctcttagttctctggatggcttgcaattgcttggcaatctcaggttgctgcaggcacatagatgcctcagtggtcatggagaagatggaaggtgtatccttccgcaatcacttgaggaactttacatccatgagtattctcaagaaactctgcagccctgcttttcagggaacctcactctcctgagaaaattacatgtactgggaaactcaaatttagtgtctctgcagctccattcctgcacagcactcgaagagttgataattcaaagctgtgagtctcttagttctctggatggcttgcaattgcttggcaatctcaggttgctgcaggcacatagatgcctcagtggtcatggagaagatggaaggtgtatccttccgcaatcacttgaggaactttacatccatgagtattctcaagaaactctgcagccctgcttttcagggaacctcactctcctgagaaaattacatgtactgggaaactcaaatttagtgtctctgcagctccattcctgcacagcactcgaagtgttgataattcaaagctgtgagtctcttagttctctggatggcttgcaattgcttggcaacctcaggttgctgcaggcacatagatgcctcagtggtcatggagaagatggaaggtgtatccttccgcaatcacttgaggaactttacatccatgagtattctcaagaaactctgcagccctgcttttcagggaacctcactctcctgagaaaattacatgtactgggaaactcaaatttagtgtctctgcagctccattcctgcacagcactcgaagtgttgataattcaaagctgtgagtctcttagttctctggatggcttgcaattgcttggcaatctcaggttgctgcaggcacatagatgcctcagtggtcatggagaagatggaaggtgtatccttccgcaatcacttgaggaacttttcatcagtgagtattctctagaaactctgcagccctgcttcctgacgaatctcacctgcttaaaacaattaagggtatcaggcaccacaagtttcaaatctctagaactgcaatcatgcactgcactcgaacatttgaagattcaaggttgtgcgtcgcttgctacattggaggggttgcaattcctccacgccctcaggcatatggaagtattcagatgccctggcttgcctccatatttggggagttcgtcagagcagggctatgagctatgcccacgactggaaaggctcgacatcgatgacccctctatccttaccacgtcgttctgcaagcacctcacctccctccaacgcctagagcttaactattgcggaagtgaagtggcaagactaacggatgagcaagagagagcgcttcagctcctcacgtccctgcaagagctccggtttaagtattgctacaatctcatagatcttcctgcggggctccacagccttccctccctcgagaggttggagatccggagttgcaggagcatcgcgaggctgccggagaagggcctcccaccttcgttcgaagaactggatatcatcgcttgcagtaatgagctagctcagcagtgcagaactctagcaagcactctgaaggtcaaaattaatgggggatatgtgaactgattactcggtggcttgttaggcgcacctttttccacctgcccaactggcgtgggctcgttcaggcgttcaagctgctgtaaattccattgccgcaatgacgaccttcagaaccgttacacaatacaaaggacatatgatggctagatcaactgtcgcagagctagctttggttcacctgaaaacataaggccaaacgcgtggttcttttaatcagaagtatcaaaaattggttttggtttttaacgaaaagatgttagaaattggttttaatgtgccagattctgtaccagaattctgtattttgctccgtaattctgtgctacgactgatgttgtatttaactgatagcaatcgaccggcaaaaccaatccgctccaatgcattgtcacatacaaattctataattctatctactgaaaaggatgattgctgttcattttcgtgattacagaaggaactgtgtatatcgtgctatttttgcattcacattgtgtcccaggttgtgctcggatcagccaatttcggtggttaattcactttgttgtgtcctctgtgcactcaagaattgttcgcacatgcaattcagttgagcatcgcactacgcaagttttttttgttaacaaaggagtggttgacagcattgcaggttgctaaaaccgtgtcaaaaatttgctaacaaaagaattctcttcagaaatagtatgaaaataaatgccacataagtaatctgagtaaaacagacagaatcactagagaagactaacgacaaaatcttctttttcaatttctgtggtgaaaaactcactaactccgcatataatctcatgtatgcattggaggtgcataccatttcgatcatgtatgcatttagctgaacattatcaagaagcaaatttattgcacgggcaaacataagctaaactaattctcaagcaatttaataatcacaaaacagtctgcaataccaagatatataaaacttttgccagcatggagcaacaacaccgaaacactacaatcaagacagctcccagaaaagattatatgttgctacttcaattgccacagttacaatcacccataatgacacatcaaattacataagagtattaagagtatatgacagttgtaacaaaacaactgcattgagaactagaacagacagccacatgaaccatattcacttcttcagatcagaaagcctggtgaactaccagtctaccaattgctaccgtagtctccatttttcacttatatgtacataggacacctgcgctatcagaatagccacaaagccagttcactcgctacaaattaatcttgactaaatccaaacagataccaactcctcttaatcaacttacaaaacacctacacttttggtgtctctacaccaccaatcacacaaaaggaaattaatcatccaccaactcgtatcctactgttagaatggaggccttacaccagagaatgggcattgccagattctgagacactgtcctttgagctccctga

SEQ ID NO: 401 - DNA, 3441 bp, Solanum lycopersicum
  source 1..3441: mol_type = genomic DNA
atggcatcttcttcttcttcttctgcaagtaattcaaagtattatcctcgatggaagtacgttgtttttctaagtttcagaggtgaagacactcgaaaaacatttacaggtcacttatacgaaggtttgagaaatagaggaataaacacatttcaagatgataaaagactagagcatggagattcaattccaaaagaactcttgagagctatagaagattctcaagttgcacttatcattttctcaaagaattatgctacatctaggtggtgcttgaatgaactagtgaagatcatggaatgcaaagaggaagaaaatggacaaacagtcataccgatcttttataatgtggatccatcacatgttcgataccaaactgaaagctttggagcagcatttgccaaacacgaatcaaagtataaggatgatgttgaggggatgcagaaggtgcaaagatggagaactgccctaactgctgccgcaaatctaaaaggatatgatatccgtaacgggattgaatcagagaatattcagcagatcgtagattgcatctcttccaaattttgtacgaatgcttattctttatcttttttgcaagatattgtgggaataaatgctcacttagagaaactaaaatcgaaacttcaaatagaaatcaatgatgttcggattttagggatctggggaataggcggagtcggtaaaacaagaatagcaaaagccatttttgatactctatcttatcaatttgaagcttcttgttttcttgctgatgttaaagaatttgcaaaaaagaataaactgcattctttacaaaatattcttctctctgaactgttaaggaaaaaaaatgattacgtctacaacaagtatgatggaaagtgtatgattccaaacagactttgttctttgaaggttctaattgtgcttgatgatatagatcatggtgatcagatggagtatttagcaggtgatatttgttggtttggtaatggcagcagagttattgtaacaactagaaacaaacatttgatagagaaagatgatgcgatatacgaagtgtctacactgcctgatcatgaagctatgcaattattcaatatgcatgcttttaaaaaagaagttccaaatgaggattttaaggagttggcgttagagatagtaaatcacgctaaaggcctccctttagccctcaaggtgtggggctgtttattgcataaaaaaaatctctctttatggaaaataacagtagagcaaataaagaaagactctaattcagaaattgttgaacaactcaaaataagttatgatgggttggagtccgaagagcaggaaatatttttagatatagcatgtttcttccgcggagagaaaagaaaagaggtcatgcaaattcttaagagttgtgactttggagctgaatacggattggatgttctgattaataaatctcttgtgttcatatctgaaaatgacaggattgaaatgcatgatttgattagagatatgggtagatatgtggtgaaaatgcaaaagcttcagaaaaaacgtagcagaatatgggatgttgaagatttcaaagaagtgatgatagactatacggggaccatgacagtggaagcaatctggtttagttgctttgaagaagtacgttttaataaggaggcaatgaaaaaaatgaaaaggcttaggatattacacatatttgatggttttgtcaaattcttctcttcgcctccctcttccaattccaatgattcagaagaagaagatgattcctacgacttagtcgtagatcaccatgatgactctattgagtacctgtccaataacttgcgttggttagtctggaatcactattcttggaagtcattgccagaaaattttaaaccagaaaagcttgttcatcttgaactccgttggagttcgcttcattatttatggaagaaaacagagcatttgccgtctctacgaaagctagatctcagcttatctaaaagtctggtgcaaacaccagatttcacggggatgccaaatttggagtatttgaatctggagtactgtagtaagcttgaagaggttcactattccctagcatattgcgaaaaactcattgagttaaatttgagttggtgtacaaagcttaggagatttccatatattaacatggaatctcttgaatctctggatctacaatattgctatggtataatggtgtttccagaaatcatcggaacgatgaagccggagttaatgattctctcagcaaacactatgataactgaactaccatcatctcttcagtacccaactcatctcacagagctagatttgagtggcatggaaaaccttgaagctcttccaagcagcattgtcaagttgaaagatttggtgaagctaaatgtgtcgtactgcttaacgcttaaaagcttgcctgaagagattggtgatttagaaaacttggaggaacttgatgcttcgcgtactctaatttcacagcctccatcttccattgtccgcttgaacaagcttaaatccttgaagttaatgaaacgaaacacattaacagatgatgtgtgctttgtgtttcctcctgtgaataacgggttactctcattggaaattctggagctcggttcctccaatttcgaagatggaagaattccggaagatattggatgtttatcctctttgaaagagttacgtctcgagggagataatttcaatcatttgcctcaaagcatagcccaacttggtgcacttcgattcttatacataaaagattgcaggagtcttacaagtctgccagaatttccaccgcaattagatacaatatttgcagattggagcaatgatttgatctgtaagtcactgtttctaaatatctcatcattccaacataacatctctgcttcagattcgttgtcgttaagagtgtttacgagtttggggagtagtatcccaatctggttccaccatcagggaacagatacaagtgtttcagtcaatttgcctgaaaactggtatgtatcagataacttcttgggattcgctgtatgttactatggcaatttaactgagaacacagctgaattgattatgagttctgcagggatgccatgtatcacctggaaacttttgttatcgaatcattcagaatgtacatatattaggattcattttttcttggtaccttttgctggcttatgggatacatctaacgccaatggtaaaacaccaaatgactataagcacattatgttatcttttcctcaagaattgaaggagtgtggagttcgtttgttctatgaagatgaatctgtgcttgagaccaccaatgatgaacttaccattggggtaaggaggatcagatacgacgacgacgatagtgaacattatgaggaggctggttgttcctcttctaagaaacaaagatcataa

SEQ ID NO: 402 - DNA, 2718 bp, Zea mays
  source 1..2718: mol_type = genomic DNA
atggcagagattgctgttcttctcgtcctgaagaagattgccatagctctggcaggagagaccctaagttttgctaaaccattgcttgcaaagaagtctgagtcggtggcagcactcccagatgacatgaaactgattagtaatgagctcgagcttatccgggcgtttctcaaggaaatcggcaggaaaggctggaaaagcgaagtgatagaaacatggatagggcaggtccgaagactggcttatgatatggaagacactgtagaccattttatttacgttgttggtacacacgatcagatgggatcatgctgggattacatgaagaagatagccaagaagcctcggcgtctggtttcactagatgaaattgctagtgagattaagaagataaagcaagagcttaaacaactctcggaaagtagagaccgctggactaaacccttggatggcgggagtggtatacctgcaggaagctatgaaactgaaaaggaaatgtatcttcctggacatgattacacaatcagcgacgaggagcttgcaggaattgatgaaaataagcaaaccttgattagttcattaaaatttgaagatccatcacttcggatcattgctgtctggggtatgggtggcgttggaaaaagcactcttgtaaataatgtgtacaaaaatgaaggatccaactttgactgccgtgcatgggtttctatctctcagtcatatagactagaagatatatggaagaaaatgctgacagatctcatcgggaaagataagatagaatttgatcttggaacaatggatagtgcagaactaagagagcaattgacaaaaactctagacaaaaggcagtacctgatcatactggatgatgtctggatggctaatgttttttttaaaattaaagaagttcttgtagataatggccttggaagcagagtaataatcacaacaagaattgaggaggtagcttcactagctaagggtagttgtaagatcaaagtagaacctctgggtgtcgatgattcctggcatgtattttgtaggaaggcatttctgaaagatgaaaaccatatctgccctccagagttgcgtcagtgtggtataaacattgtggagaaatgtgatggtttgccattagcccttgtggcaataggaagcatattgtcgctgagaccgaagaatgttgacgagtggaagctattttatgaccagcttatctgggagctacacaacaatgagaaccttaatcgcgtggagaaaattatgaatctaagttataaatacttaccagactatttgaagaactgcttcctgtattgtgctatgtttccagaagactatctaatacacagaaagagattgattagattgtggatagctgaaggatttattgaacaaaaaggggcatgcagcttagaagacactgctgaaagttatcttaaagaacttatacgacggagcatgcttcacgttgcagagaggaactgctttggtaggattaaatgtattcgaatgcatgatcttgtgcgtgaacttgccattttccaatctaaaagagagggtttcagtacaacttatggtggaaataatgaagcagtgctagtgggatcatattctcgacgagtggctgtgctccaatgcagcaagggcattccatcaaccattgatccatccaggcttcgcaccttaattacattcgacaccagcagagcattatctgtgtggtattcttctatttcctccaaaccaaagtaccttgcagtattagacttatcaagcttgcctattgagactattccaaattcaattggagagcttttcaaccttaggcttttatgcctcaataaaaccaaagtgaaagagctccctaaatctattacaaaacttcaaaacctacagacaatgagtcttgagaatggggagttagtgaagttcccacaagggttttcaaaactgaagaaattgcgacatcttatggtttcacggttgcaagatgtaactttcagcggtttcaaaagttgggaagctgtggagccatttaagggcttgtggactttgattgaactgcaaactctgtatgccattacagcaagtgaagtattagttgcaaaacttggaaatttatcccagctgaggcggcttataatttgtgatgtaaggagtaacttatgtgcacagttgtgtggctctttgtcaaagttgtgccagctgtcacgattaacgataagagcatgcaatgaagatgaagtgctacagctggatcatttgacatttccaaatcctcttcaaacccttagtttagatggacgactgtcagaaggaactttcaaatctccctttttcttaaatcatggaaatgggcttcttaggctaatgttgttttacagtcagctttcagaaaatccagtaccacacctctctgaattgtcaaacttgactaggttatcccttataaaggcatacaccggccaagaattatacttccaagcaggttggttcctgaatttaaaagaactttacttgaagaatttgtcccggctcaatcaaatagacatacaggagggagctttggccagccttgaacgtataacaatgaaacacctcccggagctacgggaggttccagtcggtttcagatttctcaagtccctaaaaacaatatttttttccgatatgcatcctgagtttgaaagcagctttcaaaaggaaatgtag

SEQ ID NO: 403 - DNA, 1005 bp, Oryza sativa
  source 1..1005: mol_type = genomic DNA
acattggtagtagtgcaatgtcagagcttcaatcactgccagacctcaatagactatcactagtgaaccttgaaaaggtttcagacactgaagatgcaagaatggcaaaacttcaagagaaagaaaagctcgagacattgatgttgaggtggaatatggatgctggaaatgccagtagaatagatcatgaagtacttgaaaccctccaacctagccagtgcctgaaaactttggagattgttgcgtatgaaggatatgtatttccatcttggatgacaagaaccgagccatatcttacatctctggttgagataagactagttaatatgagagcatgtgaaaaggcattacctccacttgggatactaccatgtctgaagattgcagagataagtggagttgataatctcagttctattggtgataatttctatggtcataacggcacattcccttcactggagaagctgattctatcatacatgacaagccttgaagtctgggaacagtcatctaggatgaatctgtttcctcgtcttgcagaacttgtcatcattcagtgcccaaaattgagagcactgcatatggagtttccatcgattgaaaagttgattttgtggatgaataacaagatgttgtacagctcgaaggaaggtatgagaggtgtagagaagagcctcgaaaatctttcaatttctttctgtgaagagttgcatgcttcttcaggctgtgagggtctacaggctcttgatcgcctcaagaagttggagatatgtggttgtcatgaattatcatgcctcccacagggtttgcagcatctttcctctctcaccagcttgaaaattgataactgcaacaaattggagattttgccagaatggttggagaacctaccttttctacagataatgtgtttgtctggctgtccaattctgcactccattcctgaaggcctaacatgtagcgacattattgttgaagattgccccaattttaaagaaccat

SEQ ID NO: 404 - DNA, 3102 bp, Oryza sativa
  source 1..3102: mol_type = genomic DNA
atggcggagacggtgctgagcatggcgaggtcgctggtgggcagtgccatcagcaaggccgcctctgccgctgccaatgagacgagcctcctgctgggcgtcgagaaagacatctggtatatcaaagatgagctaaaaacgatgcaagcattccttagagctgctgaacttatgaaaaagaaagatgaactattaaaggtttgggcagagcaaatacgtgacctgtcatatgacattgaagattcccttgatgaatttaaggtccatattgaaagccaaaccctatttcgtcagttggtgaaactcagagaacgccaccgaattgctatccgtatccacaaccttaaatcaagagttgaagaagtgagtagcaggaacacacgctacagtttagtcaagcctatttcctctggcacagagattgacatggattcctatgcagaagacattcgtaatcagtcagctcgcaatgtggatgaagctgagcttgttgggttttctgactccaagaaaaggctgcttgaaatgatcgataccaatgctaatgatggtccggccaaggtaatctgtgttgttgggatgggtggtttaggcaagacagctctttcgaggaagatctttgaaagcgaagaagacattaggaagaacttcccttgcaatgcttggattacagtgtcacaatcatttcacaggattgagctacttaaagatatgatacgccaacttcttggccccagttctctggatcaactcttgcaagaattgcaagggaaggtggtggtgcaagtacatcatctttctgagtacctgatagaagagctcaaggagaagaggtactttgttgttctagatgatctatggattttacatgattggaattggataaatgaaattgcatttcctaagaacaataagaagggcagtcgaatagtaataaccactcggaatgttgatcttgcggagaagtgtgccacagcctcactggtgtaccaccttgatttcttgcagatgaacgatgccataacattgctactgagaaaaacaaataaaaatcatgaagacatggaatcaaataaaaatatgcaaaagatggttgaacgaattgtaaataaatgtggtcgtctaccattagcaatacttacaataggagctgtgcttgcaactaaacaggtgtcagaatgggagaaattctatgaacaccttccttcagaactagaaataaacccaagcctggaagctttgaggagaatggtgaccctaggttacaaccacctaccatcccatttgaaaccatgctttttgtatctaagtatctttcctgaggattttgaaatcaaaaggaatcgtctagtaggtagatggatagcagaagggtttgttagaccaaaggttgggatgacgactaaggatgtcggagaaagttactttaatgagctaatcaaccgaagtatgattcaacgatcaagagtgggcatagcaggaaaaattaagacttgtcgaattcatgatatcatccgtgatatcacagtttcaatctcgagacaggaaaattttgtattattaccaatgggagatggctctgatttagttcaggaaaacactcgccacatagcattccatgggagtatgtcctgcaaaactggattggattggagcattattcgatcattagctatttttggtgacagacccaagagtctagcacatgcagtttgtccagatcaattgaggatgttacgggtcttggatcttgaagatgtgacattcttaatcactcaaaaagatttcgaccgtattgcattgttgtgccacttgaaatacttgagtattggatattcgtcatccatatattcacttcccagatccattggtaaactacagggcctacaaactttgaacatgccgagcacatacattgcagcactaccaagtgagatcagtaaactccaatgtctgcatactcttcgttgtataggacagtttcattatgacaactttagtctaaaccacccaatgaagtgcataactaacacaatatgcctgcctaaagtattcacacctttagttagtcgcgatgatcgtgcaaaacaaattgctgaattgcacatggccaccaaaagttgctggtctgaatcaatcggtgtgaaggtacccaaaggaatagataagttgcgagacttgcaggttctagagtatgtagatatcaggcggaccagtagtagagcaatcaaagagctggggcagttaagcaagctgaggaaattaggtgtgacaacaaacgggtcgacaaaggaaaaatgtaagatactttatgcagccattgagaagctctcttccctccaatctctccatgtggatgctgtgttattctcaggtattattggaacacttgagtgcctagattctatttcatctcctcctcccctactgaggacactcgtgttggatggaattcttgaggagatgcctaactggattgagcagctcatgcacctgaagaagatctacttattgagcagcaaactaaaggaaggtaaaaccatgctgatacttggggcactgcccaacctcatggtccttcatctttatcggaatgcttaccttggggagaagctagtattcaaaacaggagcattcccaaatcttagaacactttggatttatgaattggatcagctaagagagatcagatttgaggacggcagctcacccctgttggaaaagatagaaataggcgagtgcaggttggaatctgggattactggtatcattcaccttccaaagctcaaggagattccgattagatacggaagtaaagtggctgggcttggtcagctggagggagaagtgaacgcacacccaaatcgccccgtgctgctaatgtacagtgaccgaaggtatcacgacctgggggctgaagccgaaggatcttctatagaagtgcaaacagcagatcctgttcctgatgccgaaggatcagtcactgtagcagtggaatcaacggatccccttcccgagcaggaggagagagctcgcagtcgcaggtgatcacgttgacgacgaatgatagcgaagaagataggcacagctcaagctggctga

SEQ ID NO: 405 - DNA, 4288 bp, Oryza sativa
  source 1..4288: mol_type = genomic DNA
caccgagtgtgagcggcaacggcggtcagggagcaggcgtggctcgtcggcgagcggctacgggcaacggcgccttggcgtcaggcatccgccgtcactcacctcaagcttgcgggctctgcgaccaccctctcatagtcataggccacagaagcacatttgccttgtgcgtgctgttcgtctgttccactcgtgaacatcagacgcgaagattatagattcacccctgttcacagattcaggtctgtcacgaggcgtatgatcatcaactctgccacaaaatccattcaaaaatagaacagagcaatggaggcgacggcgctgagtgtgggcaaatccgtgctgaatggagcgcttggctacgcaaaatctgcatttgctgaggaggtggccttgcagcttggtatccagaaagaccacacatttgttgcagatgagcttgagatgatgaggtctttcatgatggaggcgcacgaggagcaagataacagcaaggtggtcaagacttgggtgaagcaagtccgtgacactgcctatgatgttgaggacagcctccaggatttcgctgttcatcttaagaggccatcctggtggcgatttcctcgtacgctgctcgagcggcaccgtgtggccaagcagatgaaggagcttaggaacaaggtcgaggatgtcagccagaggaatgtgcggtaccacctcatcaagggctctgccaaggccaccatcaattccactgagcaatctagcgttattgctacagccatattcggcattgacgatgcaaggcgtgccgcaaagcaggacaatcagagagtggatcttgtccaactaatcaacagtgaggatcaggacctaaaagtgatcgcggtctggggaacaagtggtgatatgggccaaacaacaataatcaggatggcttatgagaacccagatgtccaaatcagattcccatgccgtgcatgggtaagggtgatgcatcctttcagtccaagagactttgtccagagcttggtgaatcagcttcatgcaacccaaggggttgaagctctgttggagaaagagaagacagaacaagatttagctaagaaattcaatggatgtgtgaatgataggaagtgtctaattgtgcttaatgacctatccaccattgaagagtgggaccagattaagaaatgcttccaaaaatgcaggaaaggaagccgaatcatagtgtcaagcactcaagttgaagttgcaagcttatgtgctgggcaagaaagccaagcctcagagctaaagcaattgtctgctgatcagaccctttacgcattctacgacaagggttcccaaattatagaggattcagtgaagccagtgtctatctcggatgtggccatcacaagtacaaacaatcatacagtggcccatggtgagattatagatgatcaatcaatggatgctgatgagaagaaggtggctagaaagagtcttactcgcattaggacaagtgttggtgcttcggaggaatcacaacttattgggcgagagaaagaaatatctgaaataacacacttaattttaaacaatgatagccagcaggttcaggtgatctctgtgtggggaatgggtggccttggaaaaaccaccctagtaagcggtgtttatcaaagcccaaggctgagtgataagtttgacaagtatgtttttgtcacaatcatgcgtcctttcattcttgtagagctccttaggagtttggctgagcaactacataaaggatcttctaagaaggaagaactgttagaaaatagagtcagcagtaagaaatcactagcatcgatggaggataccgagttgactgggcagttgaaaaggcttttagaaaagaaaagttgcttgattgttctagatgatttctcagatacctcagaatgggaccagataaaaccaacgttattccccctgttggaaaagacaagccgaataattgtgactacaagaaaagagaatattgccaaccattgctcagggaaaaatggaaatgtgcacaaccttaaagttcttaaacataatgatgcattgtgcctcttgagtgagaaggtatttgaggaggctacatatttggatgatcagaacaatccagagttggttaaagaagcaaaacaaatcctaaagaagtgcgatggactgccccttgcaatagttgtcataggtggattcttggcaaaccgaccaaagaccccagaagagtggagaaaattgaacgagaatatcaatgctgagttggaaatgaatccagagcttggaatgataagaaccgtccttgaaaaaagctatgatggtttaccataccatctcaagtcatgttttttatatctgtccattttccctgaagaccagatcattagtcgaaggcgtttggtgcatcgttgggcagcagaaggttactcaactgcagcacatgggaaatctgccattgaaatagctaacggctacttcatggaactcaagaatagaagcatgattttaccattccagcaatcaggtagcagcaggaaatcaattgactcttgcaaagtccatgatctcatgcgtgacatcgccatctcaaagtcaacggaggaaaaccttgtttttagggtggaggaaggctgcagcgcgtacatacatggtgcaattcgtcatcttgctataagtagcaactggaagggagataagagtgaattcgagggcatagtggacctgtcccgaatacgatcgttatctctgtttggggattggaagccattttttgtttatggcaagatgaggtttatacgagtgcttgactttgaagggactagaggtctagaatatcatcaccttgatcagatttggaagcttaatcacctaaaattcctttctctacgaggatgctatcgtattgatctactgccagatttactgggcaacctgaggcaactccagatgctagacatcagaggtacatatgtaaaggctttgccaaaaaccatcatcaagcttcagaagctacagtacattcatgctgggcgcaaaacagactatgtatgggaggaaaagcatagtttaatgcagaggtgtcgtaaggtgggatgtatatgtgcaacatgttgcctccctcttctttgcgaaatgtatggccctctccataaggccctagcccggcgtgatgcgtggactttcgcttgctgcgtgaaattcccatctatcatgacgggagtacatgaagaggaaggcgctatggtgccaagtgggattagaaaactgaaagacttgcacacactaaggaacataaatgtcggaaggggaaatgccatcctacgagatatcggaatgctcacaggattacacaagttaggagtggctggcatcaacaagaagaatggacgagcgtttcgcttggccatttccaacctcaacaagctggaatcactgtctgtgagttcagcagggatgccgggcttgtgtggttgcttggatgatatatcctcgcctccggaaaacctacagagcctcaagctgtacggcagtttgaaaacgttgccggaatggatcaaggagctccagcatctcgtgaagttaaaactagtgagtactaggctattggagcacgacgttgctatggaattccttggggaactaccgaaggtggaaattctagttatttcaccgtttaagagtgaagaaattcatttcaagcctccgcagactgggactgcttttgtaagcctcagggtgctcaagcttgcaggattatggggcatcaaatcagtgaagtttgaggaaggaacaatgcccaaacttgagaggctgcaggtccaagggcgaatagaaaatgaaattggcttttctgggttagagtttctccaaaacatcaacgaagtccagctcagtgtttggtttcccacggatcatgataggataagagccgcgcgcgccgcgggcgctgattatgagactgcctgggaggaagaggtacaggaagcaaggcgcaagggaggtgaactgaagaggaaaatccgagaacagcttgctcggaatccaaaccaacccatcattacctgagctcctttggagttactttgccgtgctccatactatcctacaagtgagatcctctgcagtactgcatgctcactgacatgtggacccgaggggctgtggggcccacatgtcagtgagcagtactgtgcagtactgcagaggacctgcatccactatcctatattataatggattgtactatcgatccaactattcagattaactctatactagtgaacttattttt

SEQ ID NO: 406 - DNA, 11516 bp, Oryza sativa
  source 1..11516: mol_type = genomic DNA
aagcttgaaagtgtgtgaagaaatgaagaaagtgaagtctacttataggacaggtataacggttatgagaagtggaaatgtccgaactgccccgcaaccgccatcagggagtgatctggagcgtccacgccaaaccccaggatcaacggtgatcaccagggttcggctgaacctgggctgggccagatggcttccaaacctagtctgggtctcctcctcgacctgccttatccaattcttgcaattttgggatgtttctttagtagtttaaaagcccattcttgcattgatagatttctccttcacttttagtctggatttcctcccaacttctgggtttatcacctgcataaaaatatacatcaacaattgtggaatatgtgagttttaacacctatcactatgttggatattttattatctggactttatgcagacgttgacggtatagatttggcatttaacagtcgccaacattatacaatcgggtaaatagtattgatgtattccatgaatctgtgtatagaaggtatgccatatccttgacactgacaccatatgtgtttccgtttttgagaaaacatttccatttccaaaaatttctgaccaacactctctatttccgaaaactcatctgaaatccgaaaacttttcaaaccgttttcatcccagtaatgaatggcaggctctacgtgcagacccacaaatgctccacaaagatctcaaaaaatttatcgtataaatttcatacgtagactaaatttcacaaaaattcacttgtgtacccattgaggtatgtattttgttttcaaaaaaaaacacagtttaccttgtggtgctcgggacatcggccggagctcatgatcataatggagtcagtcagggtggctactggagcttatggcggaggaggtcagggtggtgggacgtggggcagagtttagtccggtcggcaaccagagctccgagaggagatctgggcagtagtgagagaagggtcaggaggcgccagagtggccacgacggaggctgggaaagcgatgccgaacagcaaagcatgcgttgaagtaggcggggtggcagcagcctcggggcggagcgggcatggaacaagggtagagctggagtcggtggccggctactgagaccattcacagtgcgtcaccaagttttgatattcttcacatgccacgtagatcagagcggtattagccacatgttacatagtgcaaaactctacaagaccacatatgggttgcttgtagtgggtcccactaataccacttttacacttctctttttacttttcccctctcctctctcccctctcttcctttccccaccggccaccgcagagagccgggcggagacggaggttgcgggggtcgggcggagcggcggctcaagcggaggtcgtggaggcgagcaggagacggcgccgggccgagtggcgacggcggtggggcctagcaccgtgcctcccctcctcctcctcctctagtggtggcgaatcgaggaagccgccgccgccgcgccccacctcttcatctgatgcgggcgggaagctgccgccaccgccgtcgggcagatccagatctccggcctccgtgtcgggcggctacgcggcggcgggcgtcggcgtcggtcagcgccctcctcacctggccagcccaccgactagccctaccgtcgtcatcatccctggtcagcaccctcctcccctggcattcggctgcctcacccctctcctctctctcctctagcggtggtgtgggtcccacctgtgggtccctctgagacgaagaacgcgtagtcaactttggctacgcgcggagctgaggaacgcacacgattggataaagtggcaaaggaatatttgcttttttggttgaggctaaatgctacgtagatctactgtgaatggcctgatggcgcagcggctctcttgcgggacagagtgggacgtgcacgacgagaaatttcctcttgcatgaataacccacggatgtaggcctccttaactaggagctacgaggtgggatttgggaggctttttctatttcaaggcttaaagcctatccaatatgatctctaatcttaaaatttagtgtttatttttgaaaaaaagttggctccaataattttcctaattagcttccaaaaattggaatcttactccctatccttctcgctctccactagtggagaagcgtgctagttcttaacacacgcatgggtggagggatcacatggatattatggaaatatcctcatggactggtgattaacatagtcctactaggagagaattgagtttattctatatcgttatcgacgtttggtatcacgactacgttatttggatggtatggggatcatcggtactagagtatatgcgagattgaggtaaaagagatggagacagatatttttatactggttcgccccttatctaacaggtaatagccctacatcctgttggctaaagccggtattgctcttattcatctgaatcgcacaagtataatatttaggataacctgtctagctgtcatcgacttggcggcatggataaccaactcgtagtcgatgacggggtagtatttctcttcgaatatgaactcgtcgagatcagagatggctctagatctctcttgccggtctcaggaggcaccagatggggtatgcctaggctaatctctaatgtcgatatttagcggcgtattggcttgtgtgtatgttatgtgttgtggctcgtcatctctcctcctagggggcttgtatttatacccatagatgcccccttgtctaagtagaactagggagataaatatggatacgatccgagtagtccttgtcgtttccatatagaactctttttgtcctttcttatccgaaactccttttatatacgaggtatgattccatataagacatggtatatggtgggccctgccgagcttagtcaggaatgtggtatccacaaccctgacaatcatgcagggttcattgtctccgagttctacgcggagactaagacaactcaaggtataaaaggcgcactctctaaggggttcaaaagagcaaatcatagcacgaacacacccaccatagtttacgaagccagaggctgtgaagcctactcgccaggagatcttgtcgactcatctcgacaaggatctcgccggtaacgctggattcatctcttctctttgtactccgtggtttccatatcaatctcatataaactggattatggttattatcttacgaggggtctaaaccagtataatctttgtctctctgattgttttaatatcgtatcatgtagatcctcataccaacttaccctaatacactatttatccgatctacaggtatcccctatcgacaataggtatataagatattataaaaaagatggagacatatgtgagctgatgatttaggctgcattcgttgcagcttctttccaacccatctccctcgttttccgtgcgcatgcttttcaaactgctaaacggtgcgttttttacaaaaagtttatatacgaaagttgcttaaaaaaatcatattgatccattttttaaaaagatagcaaaaaattaagtaatcacacgctaatggactactctgttttccgtgccggaggatagctttcccaacccagggaaacgaacccaaccttaggtgtgttcattgctaggtgttcccaacccctctcccttatattccgtgcgcatgcttttcaaactgttaaacggtgtgtctctttttaaaaaatttctatacgaaagttgctaaaaaaatcatatcaatacatttttgaaaaaaaaagctaatacttaattaatcacgtacgtactaatagaccgcttcgttttctatgcgcagaagatttgttcccaacccccacaacaaacacagccttaacatgcttgcatttaaaaagctataaaatttaataaattataaaattatagataatataacatgcttacttgatgtgacactttacctgttaagttttaggagtcggtgtttagattcaaactttttttttcaaacttccaacttttccatcagatcaaatgtttgggcacatgcattcagcaataaatgtggacaaaaaaaaaccagttgtacagtttgcatgtaaatcacgagatgaatcttttgagcctaattacgtcatgatttgacaatgtggtgctaaagtaaatatttactaatgacagattaattaggtttaatagatttgtctcgcagtttacaggcgaaatatataattttttttgttattagtttatatttaatacttaaaatgtatgtccatatacttaaaaaaattttgtaccacgaactaaacacagccaagtggactctaactctctctctctctatatatatatatatatatatatagtaatgtgttcgtatgtcctggatagaaactcatttcctccgcatagaaaacggagcggtctattaatacgtgattaattaagtattagctatttttttcgaaaataaattaatttaattttttaaataacatttatatagaaactttttaaaaaacacgttgattaaccatttgaaaagcgtgcgtgcacgcggcgtgaaaaatgaggcagagatgttgtgaaaaggagtgccgaacacagtcaaagcctcaggtggtgtttggatccagggacttaacttaaactttagtccctatatttagacactaatttatagtattaaatatagactacttataaaactaattacataaatgaaagctaattcacgagacaatttttttaagcctaattaatccataattaaagaatgtttactgtagcatcacataggctaatcatggattaattagacttaatagattcatctcgtgaattagtccaagattatagatgggctttattaatagtctacgtttaatatttataattaattttcaatccaatatgataggacttaaaatttagtcccatctacagggtcagaggattcggtcggtctcagggcagtcctctccgtataacgcagcgcccgatattttttatgggcataaatagtctgattgctactgtagcattttgttcaactaactccccaatgggcaatggctagtcgtcgagtgtcagtagtcaagagtagactccgcttcgcttcgccgtaccttctctcttctcgttctcctatttcacaaatcacaaccggattgctttcttccttcctccggtctggtccccaacctccgcggcagccatggttggcgccgagatgcttgtggccgcggcggtgagccaggtcgcccggaagatcaacgacatcgtgggggtcgcgcagggcgaggtgaagctgtgctgcaatttcagcgacgatttggagggcatcaaggatacccttgtgtacctggaaaccttgctgaaaaatgcggagaataactccttcggaagcgacagggccaacctgcgccactggcttggccagatcaagtccctggcttacgatatcgaagatatcgttgatgggtactactcttccaaggagcagttcgatgggggcagctatgcacagaaggtaacagaatctcattcctttttcttcatcggtaaaatttcttcaatttcaactcaattttagaatgccccgcaaaaaaaaaatcaattttagaatggatctacattaatgagatgtagaggtgtattactatgggcaggggaagcaccgtgtgtgcatccttagttactgcataggcaataagttatcctttccattgtccaaaaaaattttgaagcaaggaggaaaagcttgaagcttagtcttttagttttttctttttgattattttgttatttatctcagttatgagattaggagtgtatatgcactcgtgtagcttttgtctgtgtgtggatatagaggctggatttctatccattatcttaaataaattgtccaagaaatttatcaggggaaatgcagttagatgcaccattagaattgcttcattgcctgtggaagagtggaacagctctgagaattgtgattatgttttatatatttaaacaatattgattactagtactagatttactctctttttttttccttatgaaattccttgatactggtagtagtgagagataaacctaataattacatgccacatacctgtagattgtactatacttcaacacccttttgcaaatagtgagagataaacctaatacttacttacatgccacatcgtcagagcactcaattcttttttgttttggtaagcaatcagcttttgcctttacatagacaaaaattgatcgacgaatattttgaaaaaaaaaacctttgtatttatatggaaaagaaaatgcaaggtactttaccaaacaattgtgcatctatgatctatctgctatgtaggggttgataccggccttggttccttgctgcaccaactgttatttacctatctccatttttgttcttccagcaacaatagtatcaaaatactaaatgtctttcctgactaaggctaccttcataaatttacaggggtcattattctgctcgctatccaatccaatgcttctgaaaggtagcatggtttataagatgaaatccaagagagagatgctacagcaaagccaacagttgcccaatcagtatcatttcctttcatatatcaattcagctgtgcattattttgaggagaagcaaacaacatcatacagaaatactgacattgcaattgtcgggagggatgctgatttggatcatctcatggatcttttaatgcaaaacagcgctgaagagctttgtattatacccatagttgggcctgtaggttttggaaagacaagccttgcacagttagttttcaatgatacaagaacagaggtattcagctttaggatatgggttcatgtttccatgggtaatatcaaccttgaaaaaattgggagagatatagtttcacaaactacagaaaaaattgagggaaatatgcagctgcagtcaatcaagaatgctgttcagcgtgtgctaaataaatatagttgcttgatcataatagacagcctttggggaaaggatgaagaagtgaatgaattgaagcagatgttgcttacaggtagacacacagaaagcaagatcatagtgaccactcatagcaataaagtagctaagctgatttccaccgttccactgtacaagttggcagctttatctgaggatgattgtttaaaaatattctctcaaagggcaatgacaggtccgggtgacccgttgttcagggaatatggagaagaaatcgttagaaggtgtgaaggcacacccttggtagccaattttctcggttctgtggtgaatgctcaacgacaaaggcgtgagatttggcaagctgcaaaggatgaagaaatgtggaagatagaggaagattatccccaagacaaaatttcaccactatttccatcattcaagataatatattataatatgccccatgagctaagattatgctttgtatattgttcaatcttccctaaaggaactgttatagaaaagaagaaacttattcagcaatggattgcacttgacatgattgagtccaaacatggaaccttgccacttgatgtaactgcggagaaatatattgatgaacttaaagcaatctatttccttcaagttttagagcggtctcaggtaagttcatgggttgctttttaccttctgtacatatcctatgtaactagaatgtggttaaatatctccattaagcatagtagcttataccattgttttatttctaaattctcaataagtttctgtaagaagattgaccatgatagaatggccaatagtgatatctcaacaaacaagtaacactgttttcctccacagaatgatgcagaaagatccagtgcttctgaggaaatgcttcgcatgcataacttggctcatgatcttgctagatcggttgctggtgaagatatccttgttattttagatgccgagaatgagcgcaatgccagatattgcaattaccgttatgcacaggtgtctgcttctagtttagagtcaatcgatcgcaaggcatggccttccaaggcaaggtcactaattttcaagaatagtggtgtggactttgagcatgtcagtgaagttctttcagtgaacaaatacctgcgtgttttggatctcagtggatgttgtgttcaagatattccatctcctatctttcagctgaaacaattgagatacctcgacgtttcatctttatctattacagcactccctctgcaaattagtagctttcataagttacaaatgttggatctttcagaaactgaactaacagagttgccaccctttataagcaacttaaaaggactgaattatttgaatctccaaggttgccagaaacttcaacgattgaatagccttcatttgttgcatgatctacattacctaaacttgtcatgctgccctgaagttactagttttcctgaatctattgaaaatctgaccaaactccgtttcttgaatctttctggatgctctaagctttcaacattacctatcagatttttggaatcatttgctagcctctgttctttggtagatcttaacttaagtggctttgaattccaaatgttgcccgacttttttggcaacatatattcacttcagtatttaaatctgtcaaaatgtttgaaacttgaggtattaccacaatcttttggccaacttgcatatctgaaaagcctaaatctttcatattgttctgatcttaaactgctggaatcctttgaatgccttacctctcttcggtttttgaatctctcgaactgctctaggcttgaatatttgccatcatgctttgacaagcttaataatttagagtctctgaatttatcacaatgtcttggacttaaagcactacctgaatcacttcaaaaccttaaaaatcttcagcttgatgtttctgggtgtcaggattgtatagtacaatccttttctctaagtaccagaagttcccagtcctgccaacggtcggagaaagctgagcaggtcagatcaagaaacagtgaaatttcagagatcacttatgaggaacctgctgagattgaacttttaaagaataatccaagtaaagatttggcctccatctcacacctaaatgaggatagaattgaggagcctgaagttgtcactgaggtaaacttacattttattaaagaaataaaaacaatttgcctagtgtttcctttgaaatttccttatgtcaatacttaatttatctttgatagatttgagttactggtgattgagaaagttgtatgccaatttgaaccagtttctcactaccaactgaaaatgatgacgaacggaaactttattgtagttgtgctcgaattgaagatcccttttctaatgaggtgatctaattgggtaccagaacatgaatcatacttttttcagtagttcttaacatttcgtagagaaaatacatgagtgttccttcaattaaaaaactccctagaggccagcaagttataaatttaaatgggattctccttattacctagatttatgttttcagaaaattttgtaatatcatactaactaattgtccatgtccttgtttcttgatgtagccaagtgcaactagaggtatggtacaacagattccaggaaaccagctctcatcgccttcatctcatctttcttcctttgcatcaagctcagcgccatttgcatcctcctcttcggacacctcaacaagtgagcatccagtgcctaatgaagaggcggcaggtatggtacttcaaataattttctcccgatttaatcatctcaagatgaggttcacttctttatttgaatataccattataaggaaatagatcatgcgccctcttgtttaaaggaatttgatgtttttttatattcgctctctttgagatatacctgtcatccagcagtggtaaaaaggatagtatatagctgacaaatatgttcatataatttccttgtgggtaattttgatattctctttctatcttaatacgtgttatgagcaccggctaatgaccgaatggggtatgaatggaacaccggaggtcgaggcttttggcagcctcttcgacgtctggcccatgatcggcgacgaaagcaaaagcaggggatgagagagtagagaattggagacgagactatagattgaatcttgcttggttcattcatgatttcgtggcccttaattaggcttacgattgaactgaattagctaataaaaaaggataacaaagtcttctctaaatgtaagcaatcggatcactatcgctcgtccggcatgccgcgtcagttttcagctcgcgtgatctccttcgacgccgcttggaccggttgctgcatccgcgtagttgcgtttcttcatgtagacgattccgaccctttacattacaactacttggaattctttgagtgttctaaaataatttggatagtggtacatatgtggttacattttcttaatggtgacatatagccaagttggactaagattaattttaatttgtgtggaatgagaaagagtcaagacagtttgatacgtagaagtttgcatattcagaaccttatactggtttgtcttggtttattttcttgacaatgcagctttgacagttcctcggtccaaagagaaatgcgacaacactcccatgccggtaaaagatggcctgatatctgaagatgatgcaccggtacatctgcatcagaagcccctgcaggcgacagccatggcagccatatgactgacctgtaatcctacaagaaaccaactgaagattcatatgtggactgagtgaaattatgaaagttattggaataaattgttgctctgtatgtgagagcaagcttcagtccgttagcctggttccttttagtagtgttctactattgggagatcttcatcaacattttacatgaaacgtgatgtaatgaacctctgttaattgttaattgtcagagctctagttttttgtggtataaattttgttgcaagggggcaatgcactcaacttttgaatcatttgattggtatggaaatcattgcatttgtgcagagttcaggcagagttcagttcttgcatttgcacatcgtattactattacctggccttgtttggcacatctccagttccagctccacctctcctagagctggagctcagccaaacagtttcagctccaccgaaaatgggagcggagctgggtggagcactctaacaaaatgaactagagaggtggagctaggttaagctgttccacaactccacttcagatctaactcctaaagttaaatttaaaagttgaagctctaccaaacgagaaaacggacgatatgccactgtataggttgggttcgaatgaaatgccactcaatacaatgtatcggataaaatgccactcaatacgttgcctattggatgaaatgccac

SEQ ID NO: 407 - protein, 1388 aa, Malus X robusta
MGGEAFLVAFLQVLVDKLAHREVFKYFGLVKGVDQKLKKWSATLSAIGAVLNDAEERQLTAKNNTLKLWLEDLRDLAFDVEDVLDKYATKMLKRQIQHAHSRTTSKLWNSIPDGVFNFNMNSEIQKISERLQEISEQKDQLNLKIDTGALTTRARRNISPSSSQPDGPVIGRDEDKRKIVELLSKQEHRTVNFDVVAIVGMAGVGKTTLAGQVLNDMVATQTFQPAVWACVSDDFNLERVTKQILESITSRQCTTEDYNKVQDYLHKELAGKKFLIVLDDVWKTCSYGEWMKLQSPFRDGAQGSKIIVTTRDTDVSKMMGAATLVHNLEPMESSVCLQVFEQHAFLNSNDDKPPNYELLKEKIAAKCRGLPLAARTLGGVLLRKDTYEWEDILNNKLWSLSNEHDILPVLRLTYFYLPSHLKRCFAYCSILPNDYEFEEKQMILLWMAEGFILPRPEDKKQIEDLGADYFRDLVSRSLFQKSTKCISKYVMHDLIGDLARWAAGEICFRLEDKQNDDGEQLRCFPKARHSSYIRGLSDGVKRFEVFSELKYLRTFLPLRKDSFWNYLSRQVAFDLLPKLQYLRVLSFNCYKITELPDSIGDLRYLRYLDLSYTDITSLPKSTSTLYNLQTLILEGCSKLKALPIDMSNLVNLRHLNNSNVSLLEDMPPQLGRLVNLQSLTKFVVSGGGGGDRSGIRELEFLMHLRGTLCISRLENVTDVEDAQRANLNCKERLDSLVLEWSHSSDTRETESAVLDMLQPHTKLKELTIKSYAGKEFSSWVGVPLFSNMVLVRLEECNNCLSLPPLGKLPHLKELYIRGMNAVESVGAEFYGECSLPFPLLETLEFVDMQHWKVWLPFQTDHRGSVFPCLKTLLVRKCSKLEGKLPENLDSLASLEIVKCEELLVSIANYKQLRQLNIDGCKGVVHTAAKVEFELLESLYLSNISELTSLQTGELCRNGLNMVRDLKINGCEELTSSLKNEAILLQQLISLGRLEIEDNSLLVEELGKEADELLQLQILGCKLEFLKLKKCKNLLKLPEGLNQLSSLQELRIHECSSLVSFPDVGLPPSLKDIEITECHSLIYFAKSQIPQNLRRIQIRDCRSLRSLVDNEAVGSCSSSSHNCLEYLNIERCQSLTLLSLSDQLVRALRELDIYDCEQLEFLAPDGLFCNNTNYFLENFRIRRCQNLKSLPRLSGGIRGSNLREIRITDCDRLEALPEDMHNFNSLEKLIIDYREGLTCSFPANLTSLMIWKVKSCKSLWELEWGLHRLTSLRYLWIGGEDPDMVSFPPDMVRMETLLPKSLTELSIGGFPNLKKLSSKGFQFLTSLESLELWDCPKLASIPKEGLPLSLTELCIYGCPVLKERCQPGKGRYWHKISHIPYIDIDWKMI

SEQ ID NO: 408 - protein, 16 aa, synthetic construct
MWVLCLFCWPTYTHGS

SEQ ID NO: 409 - protein, 6 aa, synthetic construct
MHMYLK

SEQ ID NO: 410 - protein, 10 aa, synthetic construct
MSYKLHVVPW

SEQ ID NO: 411 - protein, 7 aa, synthetic construct
MSATPQV

SEQ ID NO: 412 - protein, 8 aa, synthetic construct
MRKHNWHI

SEQ ID NO: 413 - protein, 29 aa, synthetic construct
MRKHLQHTYILSFSLSLSLIPAQLCGRRE

SEQ ID NO: 414 - DNA, 66 bp, Dichanthelium oligosanthes
  source 1..66: mol_type = genomic DNA
aatttaactccgcctatgttgtctcaacatagccggtcccaagcccggataaaggaggagggggtt

SEQ ID NO: 415 - DNA, 61 bp, Solanum lycopersicum
  source 1..61: mol_type = genomic DNA
cttgtaactccgcctgtcaagtcacagccggtcccaagcccggaaaaaggaggagggcaag

SEQ ID NO: 416 - DNA, 52 bp, Sorghum bicolor
  source 1..52: mol_type = genomic DNA
tgcttaacactgccaatgccggtcccaagcccggataaaagtggagggggca

SEQ ID NO: 417 - DNA, 52 bp, Sorghum bicolor
  source 1..52: mol_type = genomic DNA
tgcctaacactgccaatgccggtcccaagcccggatagaagtggagggggca

SEQ ID NO: 418 - DNA, 52 bp, Sorghum bicolor
  source 1..52: mol_type = genomic DNA
tgcctaacactgccaatgccggtcccaagcccggataaaagtggagggggca

SEQ ID NO: 419 - DNA, 80 bp, Oryza sativa
  source 1..80: mol_type = genomic DNA
tatgtaactccgcctatgtcatcttaagtttatctaaatgatatagccggtcccaagcccggaaaaaggaggagggtata

SEQ ID NO: 420 - DNA, 43 bp, synthetic construct
  source 1..43: mol_type = other DNA
nnnnnnctgatgagtccgtgaggacgaaacgagtaagctcgtc

SEQ ID NO: 421 - DNA, 59 bp, synthetic construct
  source 1..59: mol_type = other DNA
acttgtccacaatcttttctgatgagtcgctgaaatgcgacgaaactcgatatgttcaa

SEQ ID NO: 422 - DNA, 171 bp, Bacillus subtilis
  source 1..171: mol_type = genomic DNA
cctataattatagcgcccgaactaagcgcccgaaaaaaggcttagttgacgaggatggaggttatcgaattttcggcggatgcctcccggctgattatgcagatcacagccgtaaggatttcttcaaaccaagggggtaactccttgaacaaagagaaatcacatgatctt

SEQ ID NO: 423 - DNA, 68 bp, Hepatitis delta virus
  source 1..68: mol_type = other DNA
ggccggcatggtcccagcctcctcgctggcgccggctgggcaacatgcttcggcatggcgaatgggac

SEQ ID NO: 424 - DNA, 186 bp, Otolemur garnettii
  source 1..186: mol_type = genomic DNA
ggcgctgtgtcgcaatctgcgaagggcgtcgtcggcccaagcggtagtaagcagggaactcacctccaatgaaacacattgtcgtagcagttgactactgttatgtgattggtagaggctaagtgacggtattggcgtaagccaataccgcagcacagcacaagcccgcttgcgagattacagcgc

SEQ ID NO: 425 - DNA, 52 bp, Chicory yellow mottle virus
  source 1..52: mol_type = other DNA
caacagcgaagcgcgccagggaaacacaccatgtgtggtatattatctggca

SEQ ID NO: 426 - DNA, 52 bp, Arabis mosaic virus
  source 1..52: mol_type = other DNA
caacagcgaagcggaacggcgaaacacaccttgtgtggtatattacccgttg

SEQ ID NO: 427 - DNA, 50 bp, Tobacco ringspot virus
  source 1..50: mol_type = other DNA
aaacagagaagtcaaccagagaaacacacgttgtggtatattacctggta

SEQ ID NO: 428 - DNA, 52 bp, Chicory yellow mottle virus; identical to SEQ ID NO: 425
  source 1..52: mol_type = other DNA

SEQ ID NO: 429 - DNA, 52 bp, Chicory yellow mottle virus; identical to SEQ ID NO: 425
  source 1..52: mol_type = other DNA

SEQ ID NO: 430 - DNA, 50 bp, Tobacco ringspot virus; identical to SEQ ID NO: 427
  source 1..50: mol_type = other DNA

SEQ ID NO: 431 - DNA, 68 bp, synthetic construct
  source 1..68: mol_type = other DNA
ggagagagaagtcaaccagagaaacacaccaacccattgcactccgggttggtggtatattacctggt

SEQ ID NO: 432 - DNA, 526 bp, Oryza sativa
  source 1..526: mol_type = genomic DNA
ctacggacttgattgtattgagccttggtatggaaacctgctaagtggcaacttccaaattcagagaaaccctggaattaaaaaaggggcaatcctgagccaaatccatgttttgagaaaacaagcggttctcgaactagaacccaaaggaaaaggataggtgcagagactcaatggaagctgttctaacgaatcgagttaattacgttgtgttgctagcggaactcccttctaaattagggaaagaagggctttcgaaatctaatacacacgtatagatactggcatagcaaacgattaatcacagaactcatatcataatataggttctttaattcttttttaaaatgaaaataggaatgattatgaaatagaaaattcataatttttttagaattgttgtgaatccattccaatcgaatattgagtaatcaaatccttcaattcatagttttcgaaatctttttaaaagcggattaatcggacgaggataaagagagagtcccattctacatgtcaatactga

SEQ ID NO: 433 - DNA, 526 bp, Oryza glaberrima; identical to SEQ ID NO: 432
  source 1..526: mol_type = genomic DNA

SEQ ID NO: 434 - DNA, 74 bp, Nicotiana sylvestris
  source 1..74: mol_type = genomic DNA
gaaagtcgtattcgatgaaagtcgtatgtacggcttggagggagatctttcatatatttcgagatccagcctac

SEQ ID NO: 435 - DNA, 130 bp, Solanum lycopersicum
  source 1..130: mol_type = genomic DNA
gagagccgtgtgatgggtgactatccagcacggttaagagagcacttttagtctgctctggtgaatggaagccccctatcatgcaataaggaagcagctcttctcacagcggagtcaccgttgactttat

SEQ ID NO: 436 - DNA, 77 bp, Hordeum vulgare
  source 1..77: mol_type = genomic DNA
gaaagccgtatgctttggaagaagcttgtacagtttgggaaggggttttttgagagaaaagaagaatctacttcaac

SEQ ID NO: 437 - DNA, 79 bp, Hordeum vulgare
  source 1..79: mol_type = genomic DNA
aggagctggatgagaagaaactctcatgtccagttttcgagtagagatggaactaagaaagagaaccatcgactataac

SEQ ID NO: 438 - DNA, 79 bp, Capsicum annuum
  source 1..79: mol_type = genomic DNA
aggagccgtgtgagatgaaagtctcatgcacggttttgaatgagagaaagaagtgaggaatcctcttttcgactctgac

SEQ ID NO: 439 - RNA, 43 nt, synthetic construct
  source 1..43: mol_type = other RNA
ccaatcgtggcgtgtcggcctgcttcggcaggcactggcgccg

SEQ ID NO: 440 - RNA, 49 nt, synthetic construct
  source 1..49: mol_type = other RNA
gagacggtcgggtccagatattcgtatctgtcgagtagagtgtgggctc

SEQ ID NO: 441 - RNA, 132 nt, synthetic construct
  source 1..132: mol_type = other RNA
gtgctcgcttcggcagcacatatactagtcgaccgccagatgccttgtaaccgaaagggggaagaggaaggaggtctgaggaggtcactttcccgaaaggatggcgtctagagcggacttcggtccgctttt

SEQ ID NO: 442 - RNA, 40 nt, synthetic construct
  source 1..40: mol_type = other RNA
ggcacgtacgaagggacggtgcggagaggagagtacgtgc

SEQ ID NO: 443 - RNA, 41 nt, synthetic construct
  source 1..41: mol_type = other RNA
ggcacgtacgaaggagaggagaggaagaggagagtacgtgc

SEQ ID NO: 444 - RNA, 46 nt, synthetic construct
  source 1..46: mol_type = other RNA
ggcacgtacgaaggaaggattggtatgtggtatattcgtacgtgcc

SEQ ID NO: 445 - RNA, 45 nt, synthetic construct
  source 1..45: mol_type = other RNA
ggcacgtacgaaggaaggtttggtatgtggtatattcgtacgtgc

SEQ ID NO: 446 - RNA, 42 nt, synthetic construct
  source 1..42: mol_type = other RNA
ggcacgtaccgagggagtggtgaggatgaggcgagtacgtgc

SEQ ID NO: 447 - RNA, 83 nt, synthetic construct
  source 1..83: mol_type = other RNA
gggaagatacaaggtgagcccaataatatggtttgggttaggataggaagtagagccttaaactctctaagcggtatcttccc

SEQ ID NO: 448 - RNA, 52 nt, synthetic construct
  source 1..52: mol_type = other RNA
ggctagctggaggggcgccagttcgctggtggttgggtgcggtcggctagcc

SEQ ID NO: 449 - RNA, 98 nt, synthetic construct
  source 1..98: mol_type = other RNA
gacgcaactgaatgaaatggtgaaggacgggtccaggtgtggctgcttcggcagtgcagcttgttgagtagagtgtgagctccgtaactagtcgcgtc

SEQ ID NO: 450 - RNA, 95 nt, synthetic construct
  source 1..95: mol_type = other RNA
gatgtaactgaatgaaatggtgaaggacgggtccagtaggctgcttcggcagcctacttgttgagtagagtgtgagctccgtaactagttacatc

SEQ ID NO: 451 - RNA, 100 nt, synthetic construct
  source 1..100: mol_type = other RNA
ggagacgcaactgaatgaaatggtgaaggagacggtcgggtccaggtgcacaaatgtggcctgttgagtagcgtgtgggctccgtaactagtcgcgtcac

SEQ ID NO: 452 - RNA, 57 nt, synthetic construct
  source 1..57: mol_type = other RNA
ggatgcgccttgaaaagcctgcttcggcagctggtgaatgacagctatggcgcatcc

SEQ ID NO: 453 - DNA, 44 bp, Pea early-browning virus
  source 1..44: mol_type = other DNA
attcaattaattcaatagaattaattctcgtattaatatgacaa

SEQ ID NO: 454 - DNA, 45 bp, Tobacco rattle virus
  source 1..45: mol_type = other DNA
attttatcactcttataagagtgatactcgtattaatatgaccaa

SEQ ID NO: 455 - DNA, 45 bp, Tobacco rattle virus
  source 1..45: mol_type = other DNA
attcaaagattacaatagtaatctctaccgtatttatttgacaaa

SEQ ID NO: 456 - DNA, 45 bp, Tobacco rattle virus; identical to SEQ ID NO: 455
  source 1..45: mol_type = other DNA

SEQ ID NO: 457 - DNA, 45 bp, Tobacco rattle virus
  source 1..45: mol_type = other DNA
attcggtagtgtgaaaacacattacctacgtattaatatgactaa

SEQ ID NO: 458 - DNA, 38 bp, Pea early-browning virus
  source 1..38: mol_type = other DNA
ttatggtctaagataattcttcagaccctcgtaatttt

SEQ ID NO: 459 - DNA, 38 bp, Pea early-browning virus
  source 1..38: mol_type = other DNA
cttaacaagaatcttatcaagattctgttcgtattcta

SEQ ID NO: 460 - DNA, 38 bp, Pea early-browning virus
  source 1..38: mol_type = other DNA
caaggtatatgcgaaacacgcgtaataccttcgtataa

SEQ ID NO: 461 - DNA, 211 bp, Tobacco mosaic virus
  source 1..211: mol_type = other DNA
gaaaaaagagtgatgtccgcaaagggaaaaatagtagtaatgatcggtcagtgccgaacaagaactatagaaatgttaaggattttggaggaatgagttttaaaaagaataatttaatcgatgatgattcggaggctactgtcgccgaatcggattcgttttaaatatgtcttacagtatcactactccatctcagttcgtgttcttgtca

SEQ ID NO: 462 - DNA, 135 bp, Tobacco mosaic virus
  source 1..135: mol_type = other DNA
ctttgtgatgttgctgtttcgttgaacaattgtgcgtattacacacagttggacgacgctgtatgggaggttcataagaccgcccctccaggttcgtttgtttataaaagtctggtgaagtatttgtctgataaa

SEQ ID NO: 463 - DNA, 43 bp, Cucumber mosaic virus
  source 1..43: mol_type = other DNA
ttctcatggatgcttctccgcgagattgcgttattgtctactg

SEQ ID NO: 464 - protein, 10 aa, synthetic construct
  VARIANT 2: note = X is R, G, or F
  VARIANT 3: note = X is Y or G
  VARIANT 4: note = X is A or F
  VARIANT 5: note = X is Y or V
  VARIANT 8: note = X is any amino acid
KXXXXILXFY

SEQ ID NO: 465 - protein, 9 aa, synthetic construct
  VARIANT 3: note = X is L or F
  VARIANT 4: note = X is Y or I
  VARIANT 7: note = X is any amino acid
IVXXVLXNL

SEQ ID NO: 466 - DNA, 82 bp, Nicotiana tabacum
  source 1..82: mol_type = genomic DNA
agacgcatccatggctgaatggttaaagcgcccaactcataattggcgaattcgtaggttcaattcctactggatgcaaaga

SEQ ID NO: 467 - DNA, 60 bp, Olive latent virus 1
  source 1..60: mol_type = other DNA
tagtatacataccaagtatacggatatcggtgcgagccctgcacagctaaagtgtataaa

SEQ ID NO: 468 - DNA, 252 bp, Olive latent virus 1
  source 1..252: mol_type = other DNA
ccacacaacgatgggtgagttacgtaactgtgctaatccctaaaagttttagtagagcggtaagcaatccggatcctggtagacaggtttaacgggctgggggtggtgccccggccgtcgcatcacttgctgatacaatctacaagactcatgggagggtctgcacaggtatccacgccgaggacgggacgaaagtctcggacggggggtagtggacccaacaccagattgaggggcttttgccccacccca

SEQ ID NO: 469 - protein, 722 aa, Olive latent virus 1
MELPNQHKQTAAEGFVSFLNWLCNPWRRQRTVNAAVAFQNSILAIEDVEHFEDINECFEESSGGQSQRTKVVAEGAYSPVKSERTRRVRKQKAKFVKYLVNEARAEFGLPKATEANRLMVQHFLLRRCKDWGVVTSQCHNNVALALTLVFVPTGDDLLARVVMNTYKTRSAVRGMDNLQGEGWWNNRLGIGGQAGLAFRAKGCLERRPGFSTSVSRGNHPDLVVKPSGHPEKQRQLLRYSGIGGHLLIGIHNNSLSNLRRGLMERVFYVEGPNGLQDPPKPVRGAFNSLNKFRDLYTKNSWRHSPVTNEQFLMNYSGRKLTIYKEAVDSLSHQPLSLRDSRLKTLLKAEKLNLSKKPHPAPRVIQPRSPRYNVCLGRYLRHYEHHAFKTIAKCFGEITVFKGFTLEQQGEIMFSKWKKYVKPVAVGLDASRFDQHVSWEALQYEHEFYIRDYPNDKQLKWLLKQQLSNIGTAFASDGIIKYKKEGCRMSGDMNTSLGNCILMCAMVYGLKEHLGINLSLANNGDDCVIVCEKADLKKLTSSIEPYFRQFGFKMEVEKPVDIFERIEFCQTQPVFDGSQYIMVRKPSVVTSKDVTSLIPCQNEAQYAEWLQAVGECGMSINGGIPVMQNFYQMLQTGVKRTKFTKTGEFQTNGLGYHSRYMHRVAQTISPETRLSLYLAFGITPDLQEALEVFYDTHTLELDDVVPVDTYQVSGEHLINGLPN

SEQ ID NO: 470 - DNA, 2172 bp, Olive latent virus 1
  source 1..2172: mol_type = other DNA
atggagttacccaaccaacataagcaaactgctgctgaaggtttcgtttctttccttaactggctttgtaacccctggagacgccaacgtacagtcaacgctgctgtcgccttccagaatagcattcttgctattgaggacgtagaacacttcgaagatatcaacgagtgttttgaggaatcgtctggaggccaatcgcagcgcactaaggttgtcgccgaaggggcttactctcccgtaaaatccgaacgcacccgccgagtccgcaagcaaaaggccaaattcgtcaaatatttggtcaatgaggctcgtgccgagtttggtctccccaaagctacagaggccaatcgactcatggtgcaacacttcctgctccgaaggtgtaaggattggggggttgtcacatcccagtgccacaacaatgttgcactcgccttgactctcgtgtttgtcccaacaggggatgatttgctggcgcgagtagtgatgaacacgtacaagacgaggtctgcggtccgtgggatggacaacctccaaggggaggggtggtggaacaacaggcttggcataggtggccaggccggcttggcctttcgggccaaataggggtgcctagagaggaggccggggttttccacgtccgtttcgcgtgggaatcaccccgatctggtggtcaaaccatcaggacaccccgagaaacagcgtcagttgttacgctatagtggaattggcggccatttattaatcggcatccacaacaactctctctccaatttgcgtaggggcttaatggagagagttttctacgtcgagggacccaatgggctccaagacccccctaaacccgttcggggagctttcaactccctgaataagtttcgagacctatataccaaaaatagttggcgtcattcccctgtaaccaatgaacaattcttgatgaattactcgggcaggaaactaactatttacaaagaagcggttgatagtttgtcgcatcaaccacttagcttacgggactcgaggctgaagactttacttaaggccgaaaaactcaatctgagcaaaaagccacatccagcaccccgggttatccaacccaggtcaccccggtacaacgtttgtttgggtcgttatctacgtcactatgaacaccacgcgttcaaaaccattgctaaatgctttggggagatcacggtctttaaagggtttactctagagcaacaaggcgaaatcatgttctcgaagtggaagaaatatgttaagcccgtcgccgtcggactcgatgcaagtcggttcgaccaacacgtgtcatgggaagcacttcaatacgagcatgaattttacattagagattacccgaatgataaacagctaaaatggttgttgaagcaacaactgagcaatattggcacagcgtttgctagtgatggcatcataaagtataagaaggagggttgtcgtatgagtggagatatgaacaccagtttgggcaattgcattctcatgtgtgcgatggtatacgggttgaaggaacacctgggcataaatttatcccttgccaataatggggatgactgcgtcattgtctgtgagaaagcggatttgaagaaattgacaagcagcatcgaaccatatttcaggcaatttggattcaaaatggaggtggaaaaacccgtggacatatttgaacgcattgagttttgccaaacccaacctgtgtttgatgggtcccaatacatcatggttcgaaaaccctcggtagtcacatcgaaggatgtcactagcttaatcccatgccaaaatgaggctcaatatgcagaatggctgcaagctgtaggtgagtgtggaatgagtattaatggtggaattcctgttatgcagaatttttaccaaatgctccaaactggagttaaacgcaccaaattcaccaagaccggcgagtttcagacgaacgggttggggtatcactctagatatatgcatagagtggcccagaccatttcgcccgaaacccgtttatccttgtatttagcgttcggtatcacaccagaccttcaggaagcactggaggtcttctatgatacccacacgcttgagttggatgatgttgtcccagttgatacctaccaagtatcaggagagcatttgatcaatggattaccaaactga

SEQ ID NO: 471 - protein, 270 aa, Olive latent virus 1
MVNFYWDSRIQRWFYESGPQRVRTYIKRISPHQMASLPARKTKRSPPNRGNLQVLPVIAPVAGGVISTEGHVPRITTTNEQTVVRNTEIISAINSAALGAIFGNYVTVIPSNLSWLAGLSDLYSKYRWRKLRFIYLPVCPTSTQGNVSMSLSFDRIDTQPTSITQMQQGYRAITFPPYAGYDGAMALASFGNIPGMVVVDVDCARMDKLWYPNVTLATFLAMAPTSRTDTCGVTLFTASDQGPAAATNFGQVFCQYEIEFIEPVNPTVNL

SEQ ID NO: 472 - DNA, 813 bp, Olive latent virus 1
  source 1..813: mol_type = other DNA
atggttaatttttactgggatagtcgaattcagaggtggttctacgaaagtggaccacagcgtgtccgcacttatataaagcggatttcaccccaccaaatggcaagtctgcctgctcgcaagactaaaaggtcacccccaaataggggcaacctacaagttcttccggttatagcacccgttgctggtggagtgatttctacagaagggcacgttcctcgaattactactactaatgagcagactgtcgtgagaaacacagaaatcataagtgccatcaactctgccgctctaggtgccattttcggcaactacgtcacggtaatcccgtccaatctatcatggttggcaggtttgtccgatttgtacagcaagtaccgatggcgcaaactccggttcatttatctaccggtttgcccaaccagcacacaaggcaatgtttctatgtcactatcattcgacagaatcgatacgcagccaacaagcatcactcaaatgcaacagggttaccgtgccattacttttccgccttacgcggggtatgatggtgctatggccttagcgtcattcggcaacattcctggaatggttgtcgtggacgtggactgcgctcgaatggacaagttgtggtaccctaatgttaccctggccacctttctggccatggcaccaacatccagaacggatacctgcggagttaccctgtttactgcaagtgatcaagggccagccgctgccaccaactttggccaggtgttctgccagtatgaaatcgaatttatagaaccagtgaacccaactgtcaatttgtaa

SEQ ID NO: 473 - DNA, 2598 bp, synthetic construct
  source 1..2598: mol_type = other DNA
tagtatacataccaagtatacggatatcggtgcgagccctgcacagctaaagtgtataaagtatttttacaacaattaccaacaacaacaaacaacaaacaacattacaattactatttacaattacacacaaacacgtttttattccggctgtgtagtctttcaacgttgtcttccgatgcccgtgtttccaaacttcagccaagaaatcgtctaagcctaaccttttccaaatctcatactcgactgcacaatgaaattcgttctgtgatttgtcatacttggaaatgtctagctctaatatgtccataggaacattagagtccagatctgagaaaaattcttcgatctgtgtaggcgttttccttgtataaaacatgaatcttgaactgtcaattgtctctagcagctgtcttgttaattctgaaaatacaggaccaaaaagcgcattgattttcttgctatgatacacaatagtttgcaaagccgggtattcagtttgaatactaagatccaaacgctgtttcggctgctgcttgatcatgtgcctgtattgatcaacggctggtaaatcaataaagtcaaaatcagccaactggccaattgttgacttctcttgcttttcgatccatctttccaaactcgcccttgaaagcagaggtatattttttggttttttcttttctttaattaagtatgcatcaaaaaacttatctactactagagaagcggtgtcttcgatgtcaacaacccctactaattcgggagagttgaaatttcttttgatcatcgcgaccaaattttccaacaatccaggttttcgaggtttttcagcagcagtcctgatcacaggtttcaatgtcgtctcagattctctcggaagaggcaccgatttcgacatatccaacacacaatccttgacattcaaactattctctcgtatttgcatagttacagcatcatactcattgagtatagtactgtttcccggcaaacacttgtcgtaataatattgcatgtcagaaacatctcctgtttttggtgctgcgacgaaaaggttaacacctttgtacaccgattctatctgtaattgctattgagtcgacggtagtcaagatgcataataaataacggattgtgtccgtaatcacacgtggtgcgtacgataacgcatagtgtttttccctccacttaaatcgaagggttgtgtcttggatcgcgcgggtcaaatgtatatggttcatatacatccgcaggcacgtaataaagcgaggggttcgaatccccccgttacccccggtaggggcccaagcacaacatttcaaccagaaacactagccgaagcaaatccattccacaagcacctggtgggatcatctcatcatcagaaaccaagagagagattccgtgtccgcttgttgtagtagattgtgaggactgaggaccgagaagcagccatggctctagttgttaaaggaaaagtgaatatcaatgagtttatcgacctgacaaaaatggagaagatcttaccgtcgatgtttacccctgtaaagagtgttatgtgttccaaagttgataaaataatggttcatgagaatgagtcattgtcagaggtgaaccttcttaaaggagttaagcttattgatagtggatacgtctgtttagccggtttggtcgtcacgggcgagtggaacttgcctgacaattgcagaggaggtgtgagcgtgtgtctggtggacaaaaggatggaaagagccgacgaggccactctcggatcttactacacagcagctgcaaagaaaagatttcagttcaaggtcgttcccaattatgctataaccacccaggacgcgatgaaaaacgtctggcaagttttagttaatattagaaatgtgaagatgtcagcgggtttctgtccgctttctctggagtttgtgtcggtgtgtattgtttatagaaataatataaaattaggtttgagagagaagattacaaacgtgagagacggagggcccatggaacttacagaagaagtcgttgatgagttcatggaagatgtccctatgtcgatcaggcttgcaaagtttcgatctcgaaccggaaaaaagagtgatgtccgcaaagggaaaaatagtagtaatgatcggtcagtgccgaacaagaactatagaaatgttaaggattttggaggaatgagttttaaaaagaataatttaatcgatgatgattcggaggctactgtcgccgaatcggattcgttttaaagacgcatccatggctgaatggttaaagcgcccaactcataattggcgaattcgtaggttcaattcctactggatgcaaagaccacacaacgatgggtgagttacgtaactgtgctaatccctaaaagttttagtagagcggtaagcaatccggatcctggtagacaggtttaacgggctgggggtggtgccccggccgtcgcatcacttgctgatacaatctacaagactcatgggagggtctgcacaggtatccacgccgaggacgggacgaaagtctcggacggggggtagtggacccaacaccagattgaggggcttttgccccacccca

SEQ ID NO: 474 - DNA, 5251 bp, synthetic construct
  source 1..5251: mol_type = other DNA
tagtatacataccaagtatacggatatcggtgcgagccctgcacagctaaagtgtataaagtatttttacaacaattaccaacaacaacaaacaacaaacaacattacaattactatttacaattacaaagctgactatgtgatcttattaaaattaggttaaatttcgaggttaaaaatagttttaatattgctatagtcttagaggtcttgtatatttatacttaccacacaagatggaccggagcagccctccaatatctagtgtaccctcgtgctcgctcaaacattaagtggtgttgtgcgaaaagaatctcacttcaaatggcatcttcttcttcttcttctagatggagctatgatgttttcttaagttttagaggcgaagatactcgaaaaacgtttacaagtcacttatacgaagtcttgaatgataagggaataaaaacctttcaagatgataaaaggctagagtacggcgcaaccatcccaggtgaactctgtaaagctatagaagagtctcaatttgccattgttgttttctcagagaattatgcaacatcaaggtggtgtttgaatgaactagtgaagatcatggaatgcaaaactcgatttaagcaaactgttataccgatattctatgatgtggatccatcacatgttcggaaccaaaaggagagctttgcaaaagcctttgaagaacatgaaacaaagtataaggatgatgttgagggaatacaaagatggaggattgctttaaatgaagcggccaatctcaaaggctcctgtgataatcgtgacaagactgatgcagactgtattcgacagattgttgaccaaatctcatccaaattatgcaagatttctttatcttatttgcaaaacattgttggaatagatactcatttagagaaaatagaatccttactagagataggaatcaatggtgttcggattatggggatctggggaatggggggagtcggtaaaacaacaatagcaagagctatatttgatactcttttaggaagaatggatagttcctatcaatttgatggtgcttgtttccttaaggatattaaagaaaacaaacgtggaatgcattctttgcaaaatgcccttctctctgaacttttaagggaaaaagctaattacaataatgaggaggatggaaagcaccaaatggctagtagacttcgttcgaagaaggtcctaattgtgcttgatgatatagataataaagatcattatttggagtatttagcaggtgatcttgattggtttggtaatggtagtagaattattataacaactagagacaagcatttgatagagaagaatgatataatatatgaggtgactgcactacccgatcatgaatccattcaattgttcaaacaacatgctttcggaaaagaagttccaaatgagaattttgagaagctttcattagaggtagtaaattatgctaaaggccttcctttagccctcaaagtgtggggttctttgctgcataacctacgattaactgaatggaaaagtgctatagagcacatgaaaaataactcttattctggaattattgataagctcaaaataagttatgatggattagagcccaaacaacaagagatgtttttagatatagcatgcttcttgcgaggggaagaaaaagattacatcctacaaatccttgagagttgtcatattggagctgaatacgggttacgtattttaattgacaaatctcttgtgttcatctctgaatataatcaggttcaaatgcatgacttaatacaggatatgggtaaatatatagtgaattttcaaaaagatcccggagaacgtagcagattatggctcgccaaggaagtcgaagaagtgatgagcaacaacacagggaccatggcaatggaagcaatttgggtttcttcttattctagtactctacgctttagcaatcaggccgtgaaaaatatgaaaaggcttagggtatttaacatggggaggtcgtcgacacattatgccatcgattatctgcccaacaacttgcgttgttttgtttgcactaactatccttgggagtcatttccatctacatttgaactcaaaatgcttgttcacctccaactccgacacaattctctgcgtcatttatggacagaaacaaagcatttgccgtctctacggaggatagatctcagctggtctaaaagattgacgcgaacaccagatttcacggggatgccaaatttggagtatgtgaatttgtatcaatgtagtaatcttgaagaagttcaccattccctgggatgttgcagcaaagtcattggtttatatttgaatgattgtaaaagccttaagaggtttccatgtgttaacgtggaatctcttgaatatctgggtctaagaagttgcgatagtttagagaaattgccagaaatctacgggagaatgaagccggagatacagattcacatgcaaggctctgggataagggaactaccatcatctatttttcagtacaaaactcatgttaccaagctattgttgtggaatatgaaaaaccttgtagctcttccaagcagcatatgtaggttgaaaagtttggttagtctgagtgtgtcgggttgctcaaaacttgaaagcttgccagaagagataggggatttagacaacttacgggtgtttgatgccagtgatactctaattttacgacctccgtcttccatcatacgcttgaacaaacttataatcttgatgtttcgaggcttcaaagatggagtgcactttgagttccctcctgtggctgaaggattacactcattggaatatctgaatctcagttactgcaatctaatagatggaggacttccggaagagattggatccttatcctctttgaaaaagttggatctcagtagaaataattttgagcatttgccttcaagtatagcccaacttggtgctcttcaatccttagacttaaaagattgccagaggcttacacagctaccagaacttcccccagaattaaatgaattgcatgtagattgtcatatggctctgaaatttatccattatttagtaacaaagagaaagaaactacatagagtgaaacttgatgatgcacacaatgatactatgtacaatttgtttgcatataccatgtttcagaatatctcttccatgaggcatgacatctctgcttcagattccttgtcactaacagtatttaccggtcaaccgtatcctgaaaagatcccgagttggttccaccatcagggttgggatagtagtgtatcagtcaatttgcctgaaaattggtatatacctgataaattcttgggatttgctgtatgttactctcgtagcttaattgacacaacagctcacttgattcccgtatgtgatgacaagatgtcgcgcatgacccagaaacttgccttatcagaatgtgatacagaatcatccaactattcagaatgggatatacattttttctttgtaccttttgctggcttatgggatacatctaaggcaaatggaaaaacaccaaatgattatgggattattaggctatctttttctggagaagagaagatgtatggacttcgtttgttgtataaagaaggaccagaggttaatgccttgttacaaatgagggaaaatagcaatgaaccaacagaacattccactgggataaggaggactcaatataacaacagaacttccttttatgagctcatcaatgggtgaggtagtcaagatgcataataaataacggattgtgtccgtaatcacacgtggtgcgtacgataacgcatagtgtttttccctccacttaaatcgaagggttgtgtcttggatcgcgcgggtcaaatgtatatggttcatatacatccgcaggcacgtaataaagcgaggggttcgaatccccccgttacccccggtaggggcccaagcacaacatttcaaccagaaacactagccgaagcaaatccattccacaagcacctggtgggatcatctcatcatcagaaaccaagagagagattccgtgtccgcttgttgtagtagattgtgaggactgaggaccgagaagcagccatggctctagttgttaaaggaaaagtgaatatcaatgagtttatcgacctgacaaaaatggagaagatcttaccgtcgatgtttacccctgtaaagagtgttatgtgttccaaagttgataaaataatggttcatgagaatgagtcattgtcagaggtgaaccttcttaaaggagttaagcttattgatagtggatacgtctgtttagccggtttggtcgtcacgggcgagtggaacttgcctgacaattgcagaggaggtgtgagcgtgtgtctggtggacaaaaggatggaaagagccgacgaggccactctcggatcttactacacagcagctgcaaagaaaagatttcagttcaaggtcgttcccaattatgctataaccacccaggacgcgatgaaaaacgtctggcaagttttagttaatattagaaatgtgaagatgtcagcgggtttctgtccgctttctctggagtttgtgtcggtgtgtattgtttatagaaataatataaaattaggtttgagagagaagattacaaacgtgagagacggagggcccatggaacttacagaagaagtcgttgatgagttcatggaagatgtccctatgtcgatcaggcttgcaaagtttcgatctcgaaccggaaaaaagagtgatgtccgcaaagggaaaaatagtagtaatgatcggtcagtgccgaacaagaactatagaaatgttaaggattttggaggaatgagttttaaaaagaataatttaatcgatgatgattcggaggctactgtcgccgaatcggattcgttttaaagacgcatccatggctgaatggttaaagcgcccaactcataattggcgaattcgtaggttcaattcctactggatgcaaagaccacacaacgatgggtgagttacgtaactgtgctaatccctaaaagttttagtagagcggtaagcaatccggatcctggtagacaggtttaacgggctgggggtggtgccccggccgtcgcatcacttgctgatacaatctacaagactcatgggagggtctgcacaggtatccacgccgaggacgggacgaaagtctcggacggggggtagtggacccaacaccagattgaggggcttttgccccacccca

SEQ ID NO: 475 - DNA, 2326 bp, synthetic construct
  source 1..2326: mol_type = other DNA
tagtatacataccaagtatacggatatcggtgcgagccctgcacagctaaagtgtataaacacaaacacgtttttattccggctgtgtagtctttcaacgttgtcttccgatgcccgtgtttccaaacttcagccaagaaatcgtctaagcctaaccttttccaaatctcatactcgactgcacaatgaaattcgttctgtgatttgtcatacttggaaatgtctagctctaatatgtccataggaacattagagtccagatctgagaaaaattcttcgatctgtgtaggcgttttccttgtataaaacatgaatcttgaactgtcaattgtctctagcagctgtcttgttaattctgaaaatacaggaccaaaaagcgcattgattttcttgctatgatacacaatagtttgcaaagccgggtattcagtttgaatactaagatccaaacgctgtttcggctgctgcttgatcatgtgcctgtattgatcaacggctggtaaatcaataaagtcaaaatcagccaactggccaattgttgacttctcttgcttttcgatccatctttccaaactcgcccttgaaagcagaggtatattttttggttttttcttttctttaattaagtatgcatcaaaaaacttatctactactagagaagcggtgtcttcgatgtcaacaacccctactaattcgggagagttgaaatttcttttgatcatcgcgaccaaattttccaacaatccaggttttcgaggtttttcagcagcagtcctgatcacaggtttcaatgtcgtctcagattctctcggaagaggcaccgatttcgacatatccaacacacaatccttgacattcaaactattctctcgtatttgcatagttacagcatcatactcattgagtatagtactgtttcccggcaaacacttgtcgtaataatattgcatgtcagaaacatctcctgtttttggtgctgcgacgaaaaggttaacacctttgtacaccgattctatctgtaattgctattgagtcgacagcacaacatttcaaccagaaacactagccgaagcaaatccattccacaagcacctggtgggatcatctcatcatcagaaaccaagagagagattccgtgtccgcttgttgtagtagattgtgaggactgaggaccgagaagcagccatggctctagttgttaaaggaaaagtgaatatcaatgagtttatcgacctgacaaaaatggagaagatcttaccgtcgatgtttacccctgtaaagagtgttatgtgttccaaagttgataaaataatggttcatgagaatgagtcattgtcagaggtgaaccttcttaaaggagttaagcttattgatagtggatacgtctgtttagccggtttggtcgtcacgggcgagtggaacttgcctgacaattgcagaggaggtgtgagcgtgtgtctggtggacaaaaggatggaaagagccgacgaggccactctcggatcttactacacagcagctgcaaagaaaagatttcagttcaaggtcgttcccaattatgctataaccacccaggacgcgatgaaaaacgtctggcaagttttagttaatattagaaatgtgaagatgtcagcgggtttctgtccgctttctctggagtttgtgtcggtgtgtattgtttatagaaataatataaaattaggtttgagagagaagattacaaacgtgagagacggagggcccatggaacttacagaagaagtcgttgatgagttcatggaagatgtccctatgtcgatcaggcttgcaaagtttcgatctcgaaccggaaaaaagagtgatgtccgcaaagggaaaaatagtagtaatgatcggtcagtgccgaacaagaactatagaaatgttaaggattttggaggaatgagttttaaaaagaataatttaatcgatgatgattcggaggctactgtcgccgaatcggattcgttttaaagacgcatccatggctgaatggttaaagcgcccaactcataattggcgaattcgtaggttcaattcctactggatgcaaagaccacacaacgatgggtgagttacgtaactgtgctaatccctaaaagttttagtagagcggtaagcaatccggatcctggtagacaggtttaacgggctgggggtggtgccccggccgtcgcatcacttgctgatacaatctacaagactcatgggagggtctgcacaggtatccacgccgaggacgggacgaaagtctcggacggggggtagtggacccaacaccagattgaggggcttttgccccacccca

SEQ ID NO: 476 - DNA, 4979 bp, synthetic construct
  source 1..4979: mol_type = other DNA
tagtatacataccaagtatacggatatcggtgcgagccctgcacagctaaagtgtataaaaagctgactatgtgatcttattaaaattaggttaaatttcgaggttaaaaatagttttaatattgctatagtcttagaggtcttgtatatttatacttaccacacaagatggaccggagcagccctccaatatctagtgtaccctcgtgctcgctcaaacattaagtggtgttgtgcgaaaagaatctcacttcaaatggcatcttcttcttcttcttctagatggagctatgatgttttcttaagttttagaggcgaagatactcgaaaaacgtttacaagtcacttatacgaagtcttgaatgataagggaataaaaacctttcaagatgataaaaggctagagtacggcgcaaccatcccaggtgaactctgtaaagctatagaagagtctcaatttgccattgttgttttctcagagaattatgcaacatcaaggtggtgtttgaatgaactagtgaagatcatggaatgcaaaactcgatttaagcaaactgttataccgatattctatgatgtggatccatcacatgttcggaaccaaaaggagagctttgcaaaagcctttgaagaacatgaaacaaagtataaggatgatgttgagggaatacaaagatggaggattgctttaaatgaagcggccaatctcaaaggctcctgtgataatcgtgacaagactgatgcagactgtattcgacagattgttgaccaaatctcatccaaattatgcaagatttctttatcttatttgcaaaacattgttggaatagatactcatttagagaaaatagaatccttactagagataggaatcaatggtgttcggattatggggatctggggaatggggggagtcggtaaaacaacaatagcaagagctatatttgatactcttttaggaagaatggatagttcctatcaatttgatggtgcttgtttccttaaggatattaaagaaaacaaacgtggaatgcattctttgcaaaatgcccttctctctgaacttttaagggaaaaagctaattacaataatgaggaggatggaaagcaccaaatggctagtagacttcgttcgaagaaggtcctaattgtgcttgatgatatagataataaagatcattatttggagtatttagcaggtgatcttgattggtttggtaatggtagtagaattattataacaactagagacaagcatttgatagagaagaatgatataatatatgaggtgactgcactacccgatcatgaatccattcaattgttcaaacaacatgctttcggaaaagaagttccaaatgagaattttgagaagctttcattagaggtagtaaattatgctaaaggccttcctttagccctcaaagtgtggggttctttgctgcataacctacgattaactgaatggaaaagtgctatagagcacatgaaaaataactcttattctggaattattgataagctcaaaataagttatgatggattagagcccaaacaacaagagatgtttttagatatagcatgcttcttgcgaggggaagaaaaagattacatcctacaaatccttgagagttgtcatattggagctgaatacgggttacgtattttaattgacaaatctcttgtgttcatctctgaatataatcaggttcaaatgcatgacttaatacaggatatgggtaaatatatagtgaattttcaaaaagatcccggagaacgtagcagattatggctcgccaaggaagtcgaagaagtgatgagcaacaacacagggaccatggcaatggaagcaatttgggtttcttcttattctagtactctacgctttagcaatcaggccgtgaaaaatatgaaaaggcttagggtatttaacatggggaggtcgtcgacacattatgccatcgattatctgcccaacaacttgcgttgttttgtttgcactaactatccttgggagtcatttccatctacatttgaactcaaaatgcttgttcacctccaactccgacacaattctctgcgtcatttatggacagaaacaaagcatttgccgtctctacggaggatagatctcagctggtctaaaagattgacgcgaacaccagatttcacggggatgccaaatttggagtatgtgaatttgtatcaatgtagtaatcttgaagaagttcaccattccctgggatgttgcagcaaagtcattggtttatatttgaatgattgtaaaagccttaagaggtttccatgtgttaacgtggaatctcttgaatatctgggtctaagaagttgcgatagtttagagaaattgccagaaatctacgggagaatgaagccggagatacagattcacatgcaaggctctgggataagggaactaccatcatctatttttcagtacaaaactcatgttaccaagctattgttgtggaatatgaaaaaccttgtagctcttccaagcagcatatgtaggttgaaaagtttggttagtctgagtgtgtcgggttgctcaaaacttgaaagcttgccagaagagataggggatttagacaacttacgggtgtttgatgccagtgatactctaattttacgacctccgtcttccatcatacgcttgaacaaacttataatcttgatgtttcgaggcttcaaagatggagtgcactttgagttccctcctgtggctgaaggattacactcattggaatatctgaatctcagttactgcaatctaatagatggaggacttccggaagagattggatccttatcctctttgaaaaagttggatctcagtagaaataattttgagcatttgccttcaagtatagcccaacttggtgctcttcaatccttagacttaaaagattgccagaggcttacacagctaccagaacttcccccagaattaaatgaattgcatgtagattgtcatatggctctgaaatttatccattatttagtaacaaagagaaagaaactacatagagtgaaacttgatgatgcacacaatgatactatgtacaatttgtttgcatataccatgtttcagaatatctcttccatgaggcatgacatctctgcttcagattccttgtcactaacagtatttaccggtcaaccgtatcctgaaaagatcccgagttggttccaccatcagggttgggatagtagtgtatcagtcaatttgcctgaaaattggtatatacctgataaattcttgggatttgctgtatgttactctcgtagcttaattgacacaacagctcacttgattcccgtatgtgatgacaagatgtcgcgcatgacccagaaacttgccttatcagaatgtgatacagaatcatccaactattcagaatgggatatacattttttctttgtaccttttgctggcttatgggatacatctaaggcaaatggaaaaacaccaaatgattatgggattattaggctatctttttctggagaagagaagatgtatggacttcgtttgttgtataaagaaggaccagaggttaatgccttgttacaaatgagggaaaatagcaatgaaccaacagaacattccactgggataaggaggactcaatataacaacagaacttccttttatgagctcatcaatgggtgaagcacaacatttcaaccagaaacactagccgaagcaaatccattccacaagcacctggtgggatcatctcatcatcagaaaccaagagagagattccgtgtccgcttgttgtagtagattgtgaggactgaggaccgagaagcagccatggctctagttgttaaaggaaaagtgaatatcaatgagtttatcgacctgacaaaaatggagaagatcttaccgtcgatgtttacccctgtaaagagtgttatgtgttccaaagttgataaaataatggttcatgagaatgagtcattgtcagaggtgaaccttcttaaaggagttaagcttattgatagtggatacgtctgtttagccggtttggtcgtcacgggcgagtggaacttgcctgacaattgcagaggaggtgtgagcgtgtgtctggtggacaaaaggatggaaagagccgacgaggccactctcggatcttactacacagcagctgcaaagaaaagatttcagttcaaggtcgttcccaattatgctataaccacccaggacgcgatgaaaaacgtctggcaagttttagttaatattagaaatgtgaagatgtcagcgggtttctgtccgctttctctggagtttgtgtcggtgtgtattgtttatagaaataatataaaattaggtttgagagagaagattacaaacgtgagagacggagggcccatggaacttacagaagaagtcgttgatgagttcatggaagatgtccctatgtcgatcaggcttgcaaagtttcgatctcgaaccggaaaaaagagtgatgtccgcaaagggaaaaatagtagtaatgatcggtcagtgccgaacaagaactatagaaatgttaaggattttggaggaatgagttttaaaaagaataatttaatcgatgatgattcggaggctactgtcgccgaatcggattcgttttaaagacgcatccatggctgaatggttaaagcgcccaactcataattggcgaattcgtaggttcaattcctactggatgcaaagaccacacaacgatgggtgagttacgtaactgtgctaatccctaaaagttttagtagagcggtaagcaatccggatcctggtagacaggtttaacgggctgggggtggtgccccggccgtcgcatcacttgctgatacaatctacaagactcatgggagggtctgcacaggtatccacgccgaggacgggacgaaagtctcggacggggggtagtggacccaacaccagattgaggggcttttgccccacccca

SEQ ID NO: 477 - DNA, 1836 bp, synthetic construct
  source 1..1836: mol_type = other DNA
tagtatacataccaagtatacggatatcggtgcgagccctgcacagctaaagtgtataaaatggtcggtatgggacaaaaggactcatacgtaggagatgaagcccaaagcaaaagaggtatcctcaccctgaaataccccatcgaacacggtatcatcaccaactgggatgacatggaaaagatctggcaccacaccttctacaacgaactccgtgtcgctccagaagaacacccagtccttctcactgaagctccactcaaccccaaagccaacagggagaagatgacccaaatcatgtttgagaccttcaacacacccgccatgtatgtagccatccaagctgtactctccttgtacgcttctggtcgtaccaccggtatcgtcttggactctggagatggtgtcacccacaccgtaccaatctacgaaggttacgctcttccccacgccatcctccgtttggacttggctggacgtgacttgaccgactacctcatgaaaatcctcaccgagaggggttactcattcaccaccacagctgaaagagcacaacatttcaaccagaaacactagccgaagcaaatccattccacaagcacctggtgggatcatctcatcatcagaaaccaagagagagattccgtgtccgcttgttgtagtagattgtgaggactgaggaccgagaagcagccatggctctagttgttaaaggaaaagtgaatatcaatgagtttatcgacctgacaaaaatggagaagatcttaccgtcgatgtttacccctgtaaagagtgttatgtgttccaaagttgataaaataatggttcatgagaatgagtcattgtcagaggtgaaccttcttaaaggagttaagcttattgatagtggatacgtctgtttagccggtttggtcgtcacgggcgagtggaacttgcctgacaattgcagaggaggtgtgagcgtgtgtctggtggacaaaaggatggaaagagccgacgaggccactctcggatcttactacacagcagctgcaaagaaaagatttcagttcaaggtcgttcccaattatgctataaccacccaggacgcgatgaaaaacgtctggcaagttttagttaatattagaaatgtgaagatgtcagcgggtttctgtccgctttctctggagtttgtgtcggtgtgtattgtttatagaaataatataaaattaggtttgagagagaagattacaaacgtgagagacggagggcccatggaacttacagaagaagtcgttgatgagttcatggaagatgtccctatgtcgatcaggcttgcaaagtttcgatctcgaaccggaaaaaagagtgatgtccgcaaagggaaaaatagtagtaatgatcggtcagtgccgaacaagaactatagaaatgttaaggattttggaggaatgagttttaaaaagaataatttaatcgatgatgattcggaggctactgtcgccgaatcggattcgttttaaagacgcatccatggctgaatggttaaagcgcccaactcataattggcgaattcgtaggttcaattcctactggatgcaaagaccacacaacgatgggtgagttacgtaactgtgctaatccctaaaagttttagtagagcggtaagcaatccggatcctggtagacaggtttaacgggctgggggtggtgccccggccgtcgcatcacttgctgatacaatctacaagactcatgggagggtctgcacaggtatccacgccgaggacgggacgaaagtctcggacggggggtagtggacccaacaccagattgaggggcttttgccccacccca

SEQ ID NO: 478 - DNA, 3914 bp, synthetic construct
  source 1..3914: mol_type = other DNA
tagtatacataccaagtatacggatatcggtgcgagccctgcacagctaaagtgtataaaaagctgactatgtgatcttattaaaattaggttaaatttcgaggttaaaaatagttttaatattgctatagtcttagaggtcttgtatatttatacttaccacacaagatggaccggagcagccctccaatatctagtgtaccctcgtgctcgctcaaacattaagtggtgttgtgcgaaaagaatctcacttcaaatgaacatgaataatactaaattaagcgcaagggccctaccgagtcttattgattattttaatggcatttatggatttgccactggtatcaaagacattatgaatatgatttttaaaacggatacaggtggtaatctaaccttagacgaaatcctaaagaatcagcagttactaaatgagatttctggtaaattggatggggtaaatgggagcttaaatgatcttatcgcacagggaaacttaaatacagaattatctaaggaaatcctaaaaattgcaaatgaacagaatcaagtcttaaatgatgttaataacaaactcgatgcgataaatacgatgcttcatatatatctacctaaaattacatctatgttaagtgatgtaatgaagcaaaattatgcgctaagtctgcaaatagaatacttaagtaagcaattgcaagaaatttctgataaattagatattattaacgtaaatgttcttattaactctacacttactgaaattacacctgcatatcaacggattaaatatgtgaatgaaaaatttgaagaattaacttttgctacagaaaccactttaaaagtaaaaaaggatagctcgcctgctgatattcttgatgagttaactgaattaactgaactagcgaaaagtgttacaaaaaatgacgttgatggttttgaattttaccttaatacattccacgatgtaatggtaggaaataatttactcgggcgttcagctttaaaaactgcttcagaattaattgctaaagaaaatgtgaaaacaagtggcagtgaagtaggaaatgtttataatttcttaattgtattaacagctctacaagcaaaagcttttcttactttaacaacatgccgaaaattattaggcttagcagatattgattatacttctattatgaatgaacatttaaataaggaaaaagaggaatttagagtaaacatccttcctacactttctaatactttttctaatcctaattatgcaaaagttaaaggaagtgatgaagatgcaaagatgattgtggaagctaaaccaggacatgcattggttgggtttgaaatgagcaatgattcaatcacagtattaaaagtatatgaggctaagctaaaacaaaattatcaagttgataaggattccttatcggaggttatttatggtgatatggataaattattgtgtccagatcaatctgaacaaatttattatacaaataatatagtatttccaaatgaatatgtaattactaaaattgattttactaagaaaatgaagactttaagatatgaggtaacagctaattcttatgattcttctacaggagaaattgacttaaataagaagaaagtagaatcaagtgaagcggagtataggacgttaagtgctaaagatgatggagtgtatatgccgttaggtgtcatcagtgaaacatttttgactccgattaatgggtttggcctccaagctgatgaaaattcaagattaattactttaacatgtaaatcatatttaagagaactactgttagcaacagacttaagcaataaagaaactaaattgatcgtcccgccaagtggttttattagtaatattgtagaaaatgggaacttagagggagaaaacttagagccgtggatagcaaataataagaatgcgtatgtagatcatacaggcggagtgaatggtactagagctttatatgttcataaggacggaggattttcacaatctattggagataagttaaaaccgaaaactgagtatgtaatccaatatactgttaaaggaaaaccttctattcatttaaaaaatgaaaatactggatatattcattatgaagatacaaataacaatttagaagattatcaaactattactaaacgttttactacaggaactgatttaaagggagtgtatttaattttaaaaagtcaaaatggagatgaagcctggggagataactttacaattttggaaattagtccttctgaaaagttattaagtccagaattaatcaatgtaaataattggattcgcacgggatcaactcatattagcggttatacactcactctctatcagggaggaggaggaaatctaaaacaaaaccttcaattagacagtttttcaacttatagagtgaatttttctgtgaccggagatgctaatgtaaggattagaaattctagggaagtgttatttgaaaaacgatatatgagcggtgctaaagatgtttctgaaattttcactacaaaattggggaaagataacttttatatagagctttctcaagggaataatttatatggtggtcctcttgtacatttttacgatgtctctattaagtaaagcacaacatttcaaccagaaacactagccgaagcaaatccattccacaagcacctggtgggatcatctcatcatcagaaaccaagagagagattccgtgtccgcttgttgtagtagattgtgaggactgaggaccgagaagcagccatggctctagttgttaaaggaaaagtgaatatcaatgagtttatcgacctgacaaaaatggagaagatcttaccgtcgatgtttacccctgtaaagagtgttatgtgttccaaagttgataaaataatggttcatgagaatgagtcattgtcagaggtgaaccttcttaaaggagttaagcttattgatagtggatacgtctgtttagccggtttggtcgtcacgggcgagtggaacttgcctgacaattgcagaggaggtgtgagcgtgtgtctggtggacaaaaggatggaaagagccgacgaggccactctcggatcttactacacagcagctgcaaagaaaagatttcagttcaaggtcgttcccaattatgctataaccacccaggacgcgatgaaaaacgtctggcaagttttagttaatattagaaatgtgaagatgtcagcgggtttctgtccgctttctctggagtttgtgtcggtgtgtattgtttatagaaataatataaaattaggtttgagagagaagattacaaacgtgagagacggagggcccatggaacttacagaagaagtcgttgatgagttcatggaagatgtccctatgtcgatcaggcttgcaaagtttcgatctcgaaccggaaaaaagagtgatgtccgcaaagggaaaaatagtagtaatgatcggtcagtgccgaacaagaactatagaaatgttaaggattttggaggaatgagttttaaaaagaataatttaatcgatgatgattcggaggctactgtcgccgaatcggattcgttttaaagacgcatccatggctgaatggttaaagcgcccaactcataattggcgaattcgtaggttcaattcctactggatgcaaagaccacacaacgatgggtgagttacgtaactgtgctaatccctaaaagttttagtagagcggtaagcaatccggatcctggtagacaggtttaacgggctgggggtggtgccccggccgtcgcatcacttgctgatacaatctacaagactcatgggagggtctgcacaggtatccacgccgaggacgggacgaaagtctcggacggggggtagtggacccaacaccagattgaggggcttttgccccacccca

SEQ ID NO: 479 - DNA, 1697 bp, synthetic construct
  source 1..1697: mol_type = other DNA
tagtatacataccaagtatacggatatcggtgcgagccctgcacagctaaagtgtataaaactcttgagtactttcgccagctcacgttgacttttttcgctatcactcctttttagtgtcaaaacgtaggggtcttcgaaaatgttgagactttgcacaatctttctcaggctcgccacagttttcgtcacgatgatatttgactctggggtatagtagataatagatagaagtggtagctttactcgaaggcgaagatctgctcgatgtatttttggcgtgcagcaaatggcatccgatcctagagttctactggcttctgtcccaaatacaaatggcttccgaaagataggattgtcttttagaagcgggagcatttgaagataaagaggagtattgaatttcgggagcacaacatttcaaccagaaacactagccgaagcaaatccattccacaagcacctggtgggatcatctcatcatcagaaaccaagagagagattccgtgtccgcttgttgtagtagattgtgaggactgaggaccgagaagcagccatggctctagttgttaaaggaaaagtgaatatcaatgagtttatcgacctgacaaaaatggagaagatcttaccgtcgatgtttacccctgtaaagagtgttatgtgttccaaagttgataaaataatggttcatgagaatgagtcattgtcagaggtgaaccttcttaaaggagttaagcttattgatagtggatacgtctgtttagccggtttggtcgtcacgggcgagtggaacttgcctgacaattgcagaggaggtgtgagcgtgtgtctggtggacaaaaggatggaaagagccgacgaggccactctcggatcttactacacagcagctgcaaagaaaagatttcagttcaaggtcgttcccaattatgctataaccacccaggacgcgatgaaaaacgtctggcaagttttagttaatattagaaatgtgaagatgtcagcgggtttctgtccgctttctctggagtttgtgtcggtgtgtattgtttatagaaataatataaaattaggtttgagagagaagattacaaacgtgagagacggagggcccatggaacttacagaagaagtcgttgatgagttcatggaagatgtccctatgtcgatcaggcttgcaaagtttcgatctcgaaccggaaaaaagagtgatgtccgcaaagggaaaaatagtagtaatgatcggtcagtgccgaacaagaactatagaaatgttaaggattttggaggaatgagttttaaaaagaataatttaatcgatgatgattcggaggctactgtcgccgaatcggattcgttttaaagacgcatccatggctgaatggttaaagcgcccaactcataattggcgaattcgtaggttcaattcctactggatgcaaagaccacacaacgatgggtgagttacgtaactgtgctaatccctaaaagttttagtagagcggtaagcaatccggatcctggtagacaggtttaacgggctgggggtggtgccccggccgtcgcatcacttgctgatacaatctacaagactcatgggagggtctgcacaggtatccacgccgaggacgggacgaaagtctcggacggggggtagtggacccaacaccagattgaggggcttttgccccacccca

SEQ ID NO: 480 - DNA, 2105 bp, synthetic construct
  source 1..2105: mol_type = other DNA
tagtatacataccaagtatacggatatcggtgcgagccctgcacagctaaagtgtataaaaagctgactatgtgatcttattaaaattaggttaaatttcgaggttaaaaatagttttaatattgctatagtcttagaggtcttgtatatttatacttaccacacaagatggaccggagcagccctccaatatctagtgtaccctcgtgctcgctcaaacattaagtggtgttgtgcgaaaagaatctcacttcaaatgatgaatgctaatggatttagcggtgtggagaaagagtatataaggaaacatcatcttcatcagcctaaggagaatcaatgcagttcgtttttagtcaagcacattcgagcacctgttcatcttgtttggtcattggttaggcggtttgatcagccacaaaagtacaagccctttgttagcaggtgcatcgcgcaaggagatcttgagattggtagtcttagggaagttgatgtcaagtctggcctccctgcaacaacgagtaccgagagattggagcttcttgatgatgaagagcacattttgagtttcagaattattggcggggatcacagacttaggaactactcctcaatcatatctctccaccccgaggtgatcgatggaagacctgggaccttagtaattgaatcatttgtggtggacgtgccccaaggaaacaccaaagacgagacgtgttattttgttgaagcattgatcaattgcaacctaaaatcacttgctgatgtctcagagaggcttgctgtgcaggacaggacagaacccattgatcaggtctaaagcacaacatttcaaccagaaacactagccgaagcaaatccattccacaagcacctggtgggatcatctcatcatcagaaaccaagagagagattccgtgtccgcttgttgtagtagattgtgaggactgaggaccgagaagcagccatggctctagttgttaaaggaaaagtgaatatcaatgagtttatcgacctgacaaaaatggagaagatcttaccgtcgatgtttacccctgtaaagagtgttatgtgttccaaagttgataaaataatggttcatgagaatgagtcattgtcagaggtgaaccttcttaaaggagttaagcttattgatagtggatacgtctgtttagccggtttggtcgtcacgggcgagtggaacttgcctgacaattgcagaggaggtgtgagcgtgtgtctggtggacaaaaggatggaaagagccgacgaggccactctcggatcttactacacagcagctgcaaagaaaagatttcagttcaaggtcgttcccaattatgctataaccacccaggacgcgatgaaaaacgtctggcaagttttagttaatattagaaatgtgaagatgtcagcgggtttctgtccgctttctctggagtttgtgtcggtgtgtattgtttatagaaataatataaaattaggtttgagagagaagattacaaacgtgagagacggagggcccatggaacttacagaagaagtcgttgatgagttcatggaagatgtccctatgtcgatcaggcttgcaaagtttcgatctcgaaccggaaaaaagagtgatgtccgcaaagggaaaaatagtagtaatgatcggtcagtgccgaacaagaactatagaaatgttaaggattttggaggaatgagttttaaaaagaataatttaatcgatgatgattcggaggctactgtcgccgaatcggattcgttttaaagacgcatccatggctgaatggttaaagcgcccaactcataattggcgaattcgtaggttcaattcctactggatgcaaagaccacacaacgatgggtgagttacgtaactgtgctaatccctaaaagttttagtagagcggtaagcaatccggatcctggtagacaggtttaacgggctgggggtggtgccccggccgtcgcatcacttgctgatacaatctacaagactcatgggagggtctgcacaggtatccacgccgaggacgggacgaaagtctcggacggggggtagtggacccaacaccagattgaggggcttttgccccacccca

SEQ ID NO: 481 - DNA, 19296 bp, Citrus tristeza virus
  source 1..19296: mol_type = other DNA
aatttcacaaattcaacctgttcgcccagaaaatacgtctggcacaacagggatccggaataggtccagcctttaagctctaatattcccacaacaaaaattacactatgtcgaaactcagaggaagcttctggtcttcggccatcgctgttaacagcgattacacgatatcgcgcatctggcgcaaacttaacaccatagtagtcctgcactactttggttttgttagaatcaccaaggtgattcgtgacaaatcggctgatatgccgatagtccctttacggaaatctgtatttccgttttctgttcgcgcggctgtcacgagcttcgtgctgctgggcgtcctcttgacgctccgcattcagggtgcctctgtggccttcccgttatcaacgcatctggcgttgttcgtccccgctctgttcgcgggtttttcgaggttttctctgtgcaaacctccgctcacctctgccgctaagaggtccctccgtcaggcaaagcgggaatctgtttccctttctagccgggcctcttctcgcttctctagggaagtccctcgcggcacacgttcaagacttcacagacgtgtggtgagacgagctgacactgccccagttgagagtccccaagacaagcctacccgacgaaacagccgacttggtaagacttctcacctcccttacgtgggggaggcagcgttggatgatatccttcgctggatcgaagaggttaatcctcatccctcgatggtcgctattccagtgcccatcacttttggaaccatgcctgcaacggcttggtgttcccactctgaagccgcagttttgcgtgccgccttgactatcacgcggctgaaactgatttctccactcaggagaaacacgtacggtacgtctataatgacgtatcttctgccactaaccgtccccgtacggtttctccccgcaagtgcgtccatttttcccagtaaatctaaactgggcgttgaggtcccctctggtagggaccttcacactgcgttcgtgagatcttctcacgcgagcgctttcttctctgacgcggttcgcgcttcgtttgttccgtccagcgcggaacaattttttcacttccgtcgtcagcggacgcatgttcttgctattacagacccggtcctgtgtggtacggtgtctgttttaatgtcggacggtgttaacacagcacgtctcgacgttgttgctccggcgtactatgcgtacgctgaatctttgggcgccagagtgcgctttttgtgggagtcgtccgacgtggacgacgctaaagttcgtgacggtcaatgttatgtccgtcatgtgttcgacgtggctctctactttgggagacgcgccgacctttccgtgcgtagagcgctgggtatgtaccccacagtgggtgcactaaaggcttatcttgttcgcgaatacggtcgcgactctcttaaggttcctatgcgtgggacctacacttttggcagtgtgtttcactgcttgtcgctaaatcttcaagtcgacctgcgatctattcctaaccatcatttagttggtgggacgtctgcccacgtcttaattgggcaggttcgagtcagtgttcctggctcgattgttaaaccttcacgttcggccgttcgtaggcgtaatagacgcatgcgacgtgatggttttctcggtagttccggttcttcttcttctgcgggggagtcgactcgctgttcggactgctcttctcctcgcggtttaccttctccttccgttttaaaaccttccctaggtcggatcccgagtatagatcggcggttccggtttcctgcgggtacgcagttgcgcgtctccgtacctaggcgggtcgatgaccatgtttacgtgtcgactggtagcaacttcgatgagttgtgccatgcagttttgacacgtatgtcaaaaggtacaactctagaaatccttttacactcgattcgagagcggaagggactacttggttttgcggcgtgcttccgttgggggtcttcacacgtgtttgtaaagcgtggcaactttactgcccgatttcctatttcggcggtcaggtatgagaatcagtatgccgcggttatgatggatgtggggactagttgggttccgaagggctacgttcccgatgttgatgttgtgaaacgtcggagaagtcgtaatcgtcgttttcctctttcccatcgtgcggtggatcagtcggtccccgcgttacagtcgagtcctgtcgaggttgcttcggtttcgagtgataagccttcatcgtcgcagaaggcttcttcaccttctacttcttcttcttcttcttttaactcgacaaggagttcagactgggtgaatgtcggtttctctcatcgaactactaataaggttcgtgaaccgcgttatgctggtcatcgtaggatcggaaattttactttcccgaggggcacagtgtacaacacgcctgtcgatgagcgcgcctataaacgtgttcttagattgcgagataccacagcctgttcctttctccgtatactgctagctcgtttgtcgggttacagacctttaagtgacgagttctttaacaagtgtgtcacttcccggtttgtcgcgtgcattgaacctgtggaatcaggtctcgttaaggtgcatttccgttctgatgttttccgtgcctctttcccgtttgacggtcaacctatacaccccgccacggctttgacattggaagtggtggtctcttgggattggatggttacggcttttcagaatcccttgaaggatggatattgctacattcgccatttcgccgaagttagtttgagcatggggcgaattttcttcaggagggacgtcgacttgggacctttcccatacgttttcgaagtgcaacaccgtcttgaaaggttgtacgggaaagctgcgttaagatacggtgttaggggtcaatattcagccccgcgctgttttcactgttgctacaacgattcaccgagaccgatggcgtcctttaatgggtaccataagatgggtggtgaagataactccctgataatcacagacaccgacaggttgcgtgctgtggggagtgcctatgaaaaagtgaagagaaacataccagattcgttattggttcggtctgtagaaaaggaccttatagagtttaatcagactctagtcgacatgcatcgatccagaccgggcgttgtcgtacctttccaaatgagtgagaatcagcaagtgatgcttactagggcgtacccggaatttaatattaattttattcattccgtacattccgatcatccggtggcagcaggttctagggcgttggagaatcatctcgttcgtaaacacgctggtaccgattattcggatgtggggggttgtccgctgtttcatttacgtgcgggtcactccggcgttcacgtttgtagaccggtgtacgatgttaaagacgctcatcgtagagtagtccgtcatcaccaacttagtaaggtttcgctagatcagagtgacggtgttaaacaagttggctggaccgtaaacacgaattctgtatgcggtaacattttgggagagtgttatcatgcatcggaggcgatggttatggttcaagtttatgacgtaccgctacgtgagttgtgtagggctatgataaacaagaaaacttccgtgtgttatatgaccatggttacacctggtgagttgttggacgcccgcgagtccttttttattaaggacttggattgttcggttgagttagatcccattgcagacagggttgtttactgtttcaacaattctgcgtatacacacacgtactccactatatgtgagtgtatgcgaactccttgcttggtagtggacgggtttttgtttactatcgaaatggtatcgctcaggtgtagcgttaattactattgtatcaccaagtcgtcggtctgtccgagaattagtgagactaagcggttgcgctaccgtcggtgtgatagcgacttgattagaatcaaaattccccggtactccagtaagactcgtagttgtttacctgggtgttactatttgtacttggacgccaagtttgtaagtcgcgtgtacgagtacgtggtcaataactgcgttgtggtgaacgcgaaaacttttgagtggacttggaattacatcaaatcttgcaagtcgagagtggtgatcagcgggaagattatacaccgagacgaaccaatcgctttagagtacttagatgggttttctgcggttatgctgtccgctggcgtgaagggtaggcaaaacgcggacgtttctagacgcttagccgctttttcgggtgaaacttcgattttcgagttagtggggtttgctatatccgagaagtgccgcgacttgttcttgggtattcaggacgctgtggaaagatgcgtgaagtcgtacctcaggaattcgtttaatatgagtttcgtggacttgtccgaccccttacttacgattagcgaatattcagaattggacgttcctatcgacttaccgggtttcggtggaatagtggacggtaacgaaactagacttatggaagacggtgttaaatcggctttattacgtaaagcggttcaagccgaggctcagttgagtcttaagagaggcaatacttccgaaatcgttccgtgtgatgacgatgacgactcgaacggtgatgattcgcgtgtttcgctcgatacggactggtggttcgtccttcggggtggtagttctggcgggttgcgagctggagccgccccttctttgtttaggtgtttactcaggaaattgggtgggggtttatgtttggcaaagaaagtgttggaactgttagtcaagcgggtggttgaatcgttttctcgtttgaagcggaaaaccgctcgtttaacgtccttcgctaatttgttgcttgcgaggctctcttgcgggtttttcgatgacactgttttttctgcggtctgggaaatagcgatcaacctgaccaggatcgtcgatggagtagtcaagacaaaactggggtgctttcgtaatttatttcgattgattcccaagttatacgctggttgtaaggacgttgtgaaggacgttagtaacgcttacaggtcggttgtctcgttttccgctgaggttttgggtaagagttactctaaactttgtcagttttgcttggaaatatttgacatcgggcttattgaggtttctgctcgtaatttgggactggaaacatgcgtttcaatagcactagctatttttgatgtgttgattacttttcctttggggagcgttagttttcccgtcgtttgcgctagggttttcggtcgtctcgctatggaagtgggatcgaactttttgtttaagaaagttttcggtaaacccgaaactcttggtgaagatactttccgtaggactgtgagtatggttttgaggcccaaagcgtttgacaagctttccgtggatgcgaaaggtttagttaggtgctctggtgttattcctggagtgttaaggataatactatcttccttgttttccgaagatgacgcttgggtgggttatagtaaacatgaagtttcttcccttcctattgttaccttttgtgtgaagagattgtcttattctctggagcggtgtaaggaagcgtgtgtcgcatttattgttgactctgctaagaagattttgaaatctttaacttcagagttcaacgaatccattcaaaactccgacttgaccagtggtgctaagtccttgtacgggcacgtgagctcgatactttacacctctagtggtgtgattaataaagcaggaagcgccgtcgctactgttaaagcggtcgggagtgatatcagtggtcgtgtgaaacgtatgcgaccccgattttctctgtcccgtcactttgacgagcagactagtgagtactactctgctagcgattgttccgaactagatgagtcgttgtttagtgaaacgcctggtcttcgtggaaacgccaggtgtagagatttgtttcgtatcgtgtctagacgcgcggtagcgtgttgtgagtacgtgacaattcttttgaaacggctagcgtcgcgtgccggtgaatactcctactcgtatgtgatggatacgctcgtgagattgtatgtggcgaccgatgatgttgttagacggtgcaggtcctttacgttcgactgtactgataaagcatctaatttcgtcaccgggtttcttagttggcgcagcttacgttctggtgcgtactctgcaactccagggttgggtggtggtagtagaggtttaacgtcgttttctcacaccggtggattcacgcgcgttatcggcgctcttgggaacaccttatcggtggtgtttgatgaggaattcttcagaactttgctgcatcggttgagggcagatgttgtggttttactggtggagttcttgaaaaaccttcccgtttgtttgttttcaatatacacttttattgaatgtcggggtaggatctttcctttaagagagttcctatggggtttttgtcgtttcgtttgggatgttatcgaggggttgtccatcaatacttatcaatacctctctgctgtcgctgagaaagtgtatcgaggtgcctttaatcgtcgatttaacgaagaggatgagaggacgcttcgagtgatcacggaagcagagggaagaatcgaatttttgcgagttgttctcgcggaaatggaaaggttccgtgctgcgtcgaacgaggtttcttcgtcgaggtcgtctgatagtccttcattcccacctacttacggtgaaattgaggagttaaatgatgattcctccgatagtgcgctagtgataggcgtcgacaacggtaccggccgcactatcgttgacggtgagaccgattctgcgtccggtagcgatagtgacgtttctatcccgttggatcgcgattttgaacaaatcgggcgtcttggcggaaacggtaacgtcgatgtcgttcggctgggtttgaaattcgttctgaagttgttacgcaacctattcgatgctagaagttttaaagtgttgtatgggttgttacttcaaacccttttttatggtggttcggtaaataaatttgtgtgtcgtctggtctttagtcttgggacttgcttacctttcgagttactccgatttgcgtgttcagcgaggcggttgttgaagagtttggcatcatttgtttaccagactaaccttttcagcgaagttatggtggagcatttgtttagcgtttcccgactgctttatgattcccggtacttcgcgactgtgttttcggaattggagagacttaacttctatttagactatttcctttcgctcccgaagagatatctattccctaattctagggctcgtagttgtgctagggttccggttcccgtgattaggaccgaaggagtggcaccagtccgtgagagatcactaaatgacatactggactctttagactctttaaaggtgtcggacctcaaagggaagtcgacgttcgttgatgatggggagtcggattccggtagtgaacattcgggtagttcgatttcgttcggttccgtcaacgaagaagttttaaatgcggtaaatggtgacagcgtttgcgaaaaagccccgttgatgaagcatgttaccgcacttagcaggttggaacgccaccctagtggtcgtaaagacattcctgtttctaggaaaacttttgtgcgtggtgaatcttcgggtgtgaaatcgaaggtgagtatgtgcgattacttggtgaccttgaattcttcgtttggcacagtgcctgacatgtaccctgttgcgcgtgacataacgtataagaaactgactaacgccatgcgcgaattctattactcgcaaaaaataaccttgtacgaacttcacgggaagttgagttcctattgggacgagttgaaggtcgcaggtttcgatagaaagttaacgagaatggatttggacgatgatgtctatgttgttgactttaatcggaaattgttggtggggagaaacggatctcatccgtttcgtaatacgttaaagtcctattgttttatgttttgtaacgatgggttggttccttgcccgcgttctcagaaatatgattatgctttgatttctaatcaaacgtcttttgttgccgcgaattcgttcttacgtgccgtggatggtaaggatttgacttttaccaatgaggaacatagccttatcgtttatgaagctcctcccggtggtggtaagactcattctttggtgaattcgtacgcggattattgcgttaaagtatcttgtttagtagtgaccgctaacaagaattctcaaaccgagatatctcagcgcatatctaatgaattgatgggcaggaagctagctgctaagtatgttaccgatgcagcttccagagtgttcactgtagattcttacttaatgaatcacttgcgacttacgactcaactgctgtttatcgacgagtgcttcatggttcatgctggggcaattggagccgtggttgagttcacgtcttgtaaagcggtggttttctttggtgatagtaagcaaatccattacattcaccgaaacgatctcggggtttcctttgttgcagatattgatgcgtttattcaaccggaacatcgtatttacggcgaagtgtcctataggtgtccttgggacatttgcgagtggctttccgagttttacccgcgacacgtagctactgctaatgtagggagtattgggaagtcgagtgtgtcaatagaggaaatcaatgggtgcgatgacgtaccttacgacaaggcggcgaagtacattgtgtacactcaggctgaaaagaacgatttgcaaaaacacctcggtcgcttaaccgtgggtcggaacaaggtagtaccaattgtaaataccgttcatgaggtacaaggagagacctataaaagggtacgtctggtgaggtttaagtatcaggaggataccccgttctcttcaaagaatcatattgtggttgctttgactagacatgttgattctttggtttattccgtacttactagtaggaggtacgacgatactgcgactaacatagatagggcgaaggaaatttttgacaaatttcgttcgtcgaatcactcgtacggttcgtcatcgttagagtggtaccttgaaaagtatcctaccgaatataagggtagtaaagcatcctctgctccgataagttgcattaacgaatttcttaatgaggtcgtcgttggttcttctgtcgtgcagttgggtgatgtgtctgaagaactaagttcacgtccctttgaatcgggttgtgataatgttactgtaagagacaccgcccctcctgactcgggtaacttacacgaaccggctcgcgttcggcgtagtaaggtcacaagcaattcctccaagaaaagcgtcactgcaagaaaaccttctgtcgtacgaaagtcgtaattataactttatcaagacggaacggtttgttggaccaagcgaatttggtagggcgatggctgctgctgttatcgaacgttgtttcaaaatggaagagatggctaagataaggtgtgatattatatcccttactgaagctaacattttaaaatggctcgataagcgcactccctgtcaaataaaggccgtacacggggagttgaaacttcccttttcggtggaggagcaaatttccaacttcaaactgatggttaaacgtgatgctaaggtaaaacttgacgattcaagtctatctaaacatcccgctgctcagaacatcatgtttcataagaagtttatcaatgccatattttccccgtgtttcgacgagttcaaaaatagagtgttgtcctcgcttaatgacaatatcgtgttctttactgagatgacgaacgctgggttagcggaaattatcagaagaatcattggtgacgacgacaacttatttgttggggaagtggatttcagtaagttcgataagtctcaggatttgttcattaaagagtacgaacgtacgttgtattccgagtttgggttcgataccgaacttctcgatgtgtggatggaaggtgagtatcgcgctagagccaccacgctggacggtcagctgagtttttcagttgatggtcagcgtcgttctggaggttcaaacacttggattgggaattccttggttactctaggtatcctttcgttatattacgacgtttcgaagtttgacttactcctcgtttctggagacgattctttaatttattcgagtgaaaagataagcaacttttcttccgaaatttgcttagaaacaggttttgagactaagtttatgtctccgagcgtgccatatttttgctcaaagtttgtggttcagaccggtaacaaaacgtgttttgtgcctgacccttataaattattagtaaagttgggggctccacaaaataagttaaccgatgtcgagttatttgagttgttcacttcttttaaggacatgacgcaggactttggtgatcaagtggttttggagaagctgaagttgctagtcgaagctaagtacggtttcgctagtgggaccactatgccagcattgtgcgctattcattgtgtgcgatcgaactttctgtcctttgagaggttatttcctttcattaggggttggtatgttgttgacgctctaaaactcagacagcttaggaaactcactaatttgatctgtgaacgtgtagtttacgacaatcgggtgagttatttttcgtacttcgataacccgttcactaaacctgacgctaacgacgataacgtggacgacctcggacaagcgggtgaattagcaaccggctgatcgattgattagttctcgctgagagctaatgtgggtagttgagtcaggatgtttgccttcgcgagcgaaagccaagacttgttagaagaaaaagtttttcgtcgtagaacttaccatcgtaaatattttggtgacgtggttaaggacttcactatcgatattggttatgatactaccgatcgcgatcctactgtattggccgattatttctcattgtatttctttttacttaacaacgatagtgttgggcctatagcagcctcaattgtggtaagcccaccggttagcgggactcataaaattcgagcgcatatcgataatcaaccgaactgtgaaggtaacgtgacttacgttaaaaccttcgacaaaagtcgctttgtgattcgcgttaaagcgtccccgtctatgagaggttactactcttttcgggtgtttcttagtagcgatgtcgctagcgaacgcagcgagttcgtgtgcagttttgttggtagcaggtttctttgctgttgtacacaaacgatatctgaaaatttgagtaaagtttgttcatcttccttcttcttcagagcagtttcagaaaccgcgaccaacgaattttctgttgcgactgatgatgtggaagacgttaagtacataagaaaacaagccgagggtttttcacgttgcgctgacccataccctcctaggtgttatcgtagcactaatttgggcgattcttcaggggttcagagtcgtacgattgaagaggaaggttatatgacgggcactgcaggtaacgtcgcagtcaccgtcccgaatactccactagttagtgctgtctctccgtatatcgcagggtacaacgagaatgcacgctcgcgcgtctcattaatacgccgggtctgttgttacgccgtttgcgttttagtggtgtccgttcttataatgagcggtttattagccattatatttatatgatttagtgtagtaactcataaggtacaattacttacttaagactcgccgtttgactctgtttaaacggggtttaatggactgcgtaattcaagggtttttaactttcctagttggtatagctgtgttttgtgcctttgccggactgattatcattgttataacaatttatcggtgcacgattaagcccgtcagaagtgcttccccttacggcactcacgcgactgtctaagcggtatggtgcttttgggtttagacttcggtaccacgttttcaacggtggctatggctacaccttcagagttagttatactcaaacaatccaattcatcgtacatacctacgtgtttactcctgcatgcggaacctaacagcgtatcttatggttacgatgcggaatatttagcggcttctggggagtctggttcgttttacaaagatttgaagcggtgggttggttgcactgcgaagaactaccaaacctacttacacaaactatcaccttcctataaggtgatagtgaaagagtttggaactaagagcgtgccggtgccatatttgtcacctctgaataacgatttaggactcagcgtcgctttaccttcactgattgcttcgtatgccaaatccattctgtcggatgcggaacgagtgttcaatgtaagctgcactggagttatatgttcggtacctgctggttataacacgttacaacgagcttttacacagcagagcatatcgatgtcgggttactcttgtgtgtacattattaacgaaccttcagcagccgcgtactccactttacctaagttgaattcggcagataagtatttagccgtttacgacttcggcggtgggacttttgatgtctctatagttagcgttagattacccactttcgccgttagaagttcgagcggtgacatgaatttaggcggtagagatatcgacaaaaagttatccgataaaatatacgaaatggctgattttgtgccgcaaaaagaattgaacgtttctagtttaaaggaagctttatctcttcaaaccgatccggtcaaatatactgtgaatcattacggaatgagtgagaccgtatcaattgatcaaacggtgttgagggagatagcctcggtgttcataaatcgaacgatagatatacttacgcaagttaaggttaagtctagtatgcccgaatcgcaaagtttgaagttagtggtagtcggtggaagctcgtacctaccagggttgttggacgctttggcaaccgtgccttttgtgtctgggatagtgccggtggaagacgcaagaaccgctgtcgccacagggtgcgctttgtatagcgagtgcttagatggtaggtctaaggccctactaatagattgtattacgcatcatttgtcggtcacgacgtttagcgcggattcggtcgttgttgcagcggccggtagtccaattccttttgaaggtgaacaaaaactcacgttacgcaaatgcgttagtacgtctaactatcaagcaagaatgttcgaaggggattacgaaaaagttttccgaaatgaacgtatatacgcagcttcgatatcattgtttacattaggagttaattggagtgtgcctaacgacgttgagatgactctcgtgaccaaagtggactcgatgggtaaagtggaattttaccttaaaggtccatctggtgaactggttaacgtgcaaggtacttcgcattacgattatgctggtatgcctcaccccactagaaagctggtgaggcttagcgattacaatgtaaactccgccgctttagttttagctttgacattaactcgcgaaaaacgagaaaagttccttttgcgaacattatttgacactttactagcggatttacgaaagacagcaagtttaggcgagtactcaaagaagtacccgatcactcgaaacgatatcgatgtcgtctcatcacgtatggggatcgttgtttcgaaagttttacggggaagcgatttggaaagaatacctctctgaatcaactcgaaatttcgatgaaagaaatgtatcgttagaccacactttgagttcgggtgtggtcgtccgtaggcagagtcttttgaatgcgcctcaaggtactttcgagaacgagttagcgctattgtacaattcggtggtgattaacgattttgttgagttgactggtatgcccttgaaatctttgatgacaggtatcgaagaccgtaaggtacctgacgaattaatatccgttgacccgcacgaagtcggatgtagattcacgttaaacgacgtggaatcgtatctaatgagcaggggtgaagatttcgctgatctagcggcggtcgagcattcgtggtgtttgagcaactcttgtggtagactattaagttcgactgagatagatgcttacaaaaccttggtgtttactaagaattttgatagtaatgtatccggagtgactactaagttagagacttatctatcgtactgcatatcattgtacaagaaacattgcatgaaagacgatgattattttaatcttatcttacctatgtttaattgtttaatgaaagtgctggcgtcgcttggtttgttttatgagaaacatgccgacaatccgctactgaccggaatgctcatagagttttgcctagaaaataaggtgtattactctacttttaaagtgaatttagacaacgtcagattgtttaagtctaaagtgttgcctgtggtgttaacggtttgggatatatccgagcctgatgacccaatggatgaaagggtgctgattcctttcgatcctacggatttcgtgctcgatttacctaaattgaatatacacgatacaatggtggtggtgggtaatcaaatcagacagttagaatacgtagtcgaaagcgatgctttagacgatctatctcaacacgttgatttacgtttagcagcggacaatcccgatctacgcgttggtctgcgttgggcagggatgtttgtgtactacggtgtttatcggtgtgttgttgatagagcggtggaacgaccgacgttgtttagattgccgcagaaactactgagtcaggatgatggcgaatcgtgctcattacacatgggttccgtcgaagctttattcaatctggtgcagaaagtgaacaaggacataaacgttagacgtcagttcatgggacgtcatagtgaagtggctttgcgactgtatcgcaacttaggtttgaggtttccaccgatctcatcggttaggttaccggctcatcacggttatttatacgtcgatttttacaaaagagtacctgacggtgctgttaccgccgacgaactcgaaagtttacgtcaattacgctcatccgtggacgttatgtgtaaggacagggtgtcaatcacacctccaccattcaatcgacttagaagaggttcttctagaacatttagaggtcgaggcgcacgcggtgcgagctcgcgtcatatgagcagagacgtggcgacttccgggtttaatttaccttatcatggcaggttatacagtacttcctaaaaccgatgataaagaaatggatcctgtgagtgctgccgtgcccggtaagtatccggatgtcattgaaaagttcgtggccaataggtccgtagatgcgttaatagaaggcgttataagtaaattggataccaattcaatatacgaagattccactgaaaagtttactggtgaacacttgaaatacgttatggttactatggacactttcttattagaaaactacaaaacgaaaacggaagatctgttggttcacttaactatgatccaaaagaggttatacactatatccacgagcactaaaaccaagtttcgcgataaaggttgtattagttacgtacaagggggtttacgatataagttgttggacaaagtagtttttcctttcattatatcgaaatttaccgacagggagactccaaacgctctacgtaagtttgcttgcactttcgaggagttacacttgtgtatggctaggttaagacccgacttatacgaaaataaaaggacgaccagggctgggactccacatttaaagggctacctatcagctgactttctctcaggttctctccctgggtactccgaacatgaacgaggtatcattcttcgagcgtccgagtctatgttagctagacgtcaaggttacgaggaggcgaccgagcttcttaacctacgcgatttgggtaagtacttatagttggtttggggacggtaacattatactatcccatgagcgctgccttaagggtcgttaattgacgacttttgatatatttactaggtttgaattatggacgacgaaacaaagaaattgaagaacaaaaacaaggaaacaaaagaaggcgacgatgttgttgctgccgagtcttctttcagttccgtaaacttacacatcgatccgactttgataacgatgaacgatgtgcgtcagttgagtacccaacagaacgctgctttgaacagagacttattccttactttgaaagggaagcatcctaacttacctgataaagataaggactttcgcatagctatgatgttgtatcgtttagcagttaagagttcatcattacaaagcgatgacgacgccacgggtataacgtacactcgggagggtgttgaagtggatttgtctgacaaactttggactgacgtcgtgtttaactctaagggtattggtaaccgtactaacgcccttcgagtttggggtagaactaacgatgccctttacttagctttttgcagacagaatcgcaatttgagttatggcggacgtccgctagacgcagggattccggccgggtatcattacttgtgtgcggatttcttgactggggctggtttgactgatttagaatgtgctgtgtacatacaagctaaagaacaattattgaagaagcgaggggctgatgatgtcgtagttactaatgtcaggcagcttgggaaattcaacacacgttgatctgttgcgttccgattcccggtttctatcgggatggtggagtttcatcgtgaacgtgggtgatataatcgtccggttcgcgttacacgttcctaatgaagatatgctgaatagtttttcagctatatcgaattgtacgattatagcggacggtagtgctttactaaaagataatactgtggtcgatcgtttagaaggcatgaatcctttggcttatttattaaaattagcgaaaacgactactactatttgttttactatgtctaataaggttctttttggtactactaaatccgaaccacttagttgtttagctatcacgtcggatcgagttttattcaaagttgttatgggtactaacgttgacgattctcgatgcggctgcagtatttggttttacaacaacggtacgtttcaaaatggattgatccgttgtaataatctcgtcactttgtttagcgtgacttagacacgaagtgactgttcggattcaattgctgcaatgagcattcggcgctcgtggttaaaggttatggctgtagttacggtattatggtacggtaaagagccttccattagtgaaggttacaatgctctcatgaatgatgactttaagtttatcgatacgcattttacaaacgtttcttacgctaagaaatgttacgatttggctaatttcgatttagactttctacgcatcgttatcattcctttgagtgggggtacggtgaatgaatcgcgtgctgatcgcactaacgtttcagaaattgtcgaatcgcatgtgagcgaccgagacaggatgagcatcttgttgcgtaataagcggatccaaattccttcgctcttaccttgcgataactagagtctactcagtagtacgtctattagtataacgtattaagcactttagtaaagggttttgtttaaatcaaacaatatgcgagcttactttagtgttaatgattacataagccttttggctaaggtcagcgctgttgtggaacgtttatgcgatcccagcgtaactcttgcggaagtgatggacgaaattaatgactttaactcgtttctcgctttagtgcactctatgaagtcagacatgaacggagaccatcaggatggccaccacgagatgggtgaacacaagtctcggttgttatgcaacatagaggcgaaattgcgagtacttctcgacatcataagacgtcggttcactcgcgacaagctgctctgtactagcgcgacagatgtcatgggcttctttgtaatgaggtacatgagttctagccacaccagcttcgaatccgtaatgaggacggagttgaggttggtggttaaggcggtactgtcggatttatcccgcgcgcataaactggattttagcgagcgagcttttgcggcttatggtatccttttgcaaaagggtactgtgtcgaccgtttgcggtcagtttgacattaatttagtctctccatcttgcgtgtaggttaatacgcttctcagaacgtgtggttgtattaactaactttaattcgaacaaatatattgtgaaagtctgcgagttacaatggataatactagcggacaaactttcgtttctgtgaacctttctgacgaaagcaacacagcgaccactgacgtcgaacccgtgagttcggaagcggatcgcttggattttttacagaaaatgaatcccattattatcgatgctttgatacggaagaatagttatcagggcgctcgctttcgcgcgagaataataggagtgtgcgtggattgcggtagaaaacacgataaggggttgaagactgaacgtaagtgtaaggtcaacaatacgcagtctcagaacgaggtggcgcatatgttaatgcacgaccccgttaagtatttaaacaaaagaaaagctagagccttttctaatgcggagatatttgcgattgatttggttatgtacaccaaggaaaggcaattggctattgatttggccgctgaaagggagaaaacgagactggctcgtagacacccgatgcgttctccggaagaaactccggaatattataaattcggtaggactgctaaagcaatgttaccggacatcaacgccgtagacgttggtgataacgaggaaacttcgtcggagtatccagtgagtctgagtgtttctggcggagttctccgcgaacaccacttcatctgattgaagtggacggaataagttcctcgcggaactttgtgttgggttggtaaagacccttatgatggtgatatatcactagacaataaccggatgggtaaagtctttaaaatgatcgaggggaaaattaaccgtatcctctcgttggtctaagctcccacagagtggtagtggtctcaagtgaggcttaacgtatgcgtgaaccaaagaagttctccttagagtgtgtgttgtttacccaacgcactgtccctatggggggccaacataggtcca

SEQ ID NO: 482 - DNA, 3439 bp, Spinach latent virus
  source 1..3439: mol_type = other DNA
gtggtattgtgcattattattttaacgcacaacccggattaatcaggttttctgagtatatacccgttagtactcaatggatacaattgttcaaatgaaagtattgtgttacgagtcgatgatattattaatgataccttcagacgtaaacgcaccaaggccggaaactgccattggtaggttgatttccgatgccgctgtttcaggtgttttgcgacaatgcgatttcactgcagcggaagcctctcaatgttttgttccaattatcaccggaagatcagaatgcattgagacgcgattttctggaagagaaatacagtttcgcaatttttcgtattcctcacaatcattcgctgctgcgcatcgagtgtgtgaagcggattatatttatagtcgattccagacgagaaataccacgatcattgatattggaggaaatttttgcacccatagtaaaatgggtagagataatgttcattcatgttgcccgatattggacgttcgtgatggagctcggtatactgacaggttcatgtctgtggcgggggctttggaaacccagcctgaccgtgagctcagactgaactattgttccaataaatttgaagattgtgatgtttccgcaccatgggcgatggcgattcactcgatttcagatataccgatcacaagtgttgttaagcattgtttccgcagaggggtcaagaaattgatagcctctgtgatgatggatcccatgatgcttgttgcttctcaaggttttatgcccagattgaatgttcaatgggaaattgaacctgatgaggagaacaaaggttcccggcgaatttcttttcatttcgtcgatgctcctggattgtcatatactcataactatgacgtgcttatgcagtacatgacttgtaatcaagtcataatcagtgggaaagccgcgtatcgagttgagcgcgttgcagatctgtctggtgtttttattgttgagattaaccctggcggcaactgctggaatgaaagactggatctagttcccatgcgagatgtttcatgcgcgtggatgacttcgttaaaacgtaagaccttagtgcgggttgccatcccgcaatatattcattcatgggaagttaagtatgtgattgccgacactgattttgttagaagagttgctgaagtgtcgttccgtcagtataaaccagaaacaccattacaggatttggtgaaatctgttgcgacgatgatttcctctgcttctaaccattgcattatcaatggtgtcaccatgcaaactggtacaccgttggccattgaggactatgtcccaatggcggtgacttttgttgccttcgctaaatcaagatatgattcgataaaggaaggcatgaaaatggttaggcagagaggtactaatatcgcggatcctaatgatcattatgattatgagaaagatggatcggatgttaagagtttttcaaatcacataattcccatgaagaataccatcaagtctctgtttttccccatgaaagtgaagatgaatgataattctatgctcatttatagtcaaggaatcttgtcaactgttgttgatgagataaaaacactttttggatgggatgtttgggacactgacgatgcggtaatacagtctctgccctctttttataagatggaggatgtttttcaagttacgtctgaccactattgtttatcacatacattatctgtggattggtggttggagggactgtatgattcttaccatgacatgcgtgttgcgcataaaaagaaacttgatgaagaagaatctcggaagaccaaggtcgagaatgccttattgaaaattgctgaggttttggagaaacctgatgttagcgatggtcttaaagctctttcagaattgcccataatatcatcattattggagaagaagagcgaagaaatcgttacaaaacctcaatgcagggatactgaaaaaccccatattaatccctatgctgatgcaatcaaagaggcgcaggcctattacgaagagcttgaggtcgtaaatactcgcaatttgagaggtgttggtgattacctcttttggcgaaagaagtcgaactatgccagcgtttggggcgctgatgaatcgagagtggttcttgaacctatggcaaggaagttttactctcgagatagaaatgtttccatacccgagtatgagcgaggtatgacggttgatggtttcgtctccattaaatgggtggacggaaacattactgaggacacgtggaagtgtctttccaaatacgcagttgttttgctcgactcttcttgcgtgtttgatgccggttcacgtattatgccaggtctgaaaaaggcattggtaatggatgcaaatttcaaaatcgtgatcgaggatggtgtggcaggatgtgggaaaacaacatctctcctcaagcaagctaagccggattcggatttgttgttagctgccaaccgtgagactgcaaatgacgcaaaagccagcggcgttattcctaaagcgcttgaataccgagtgagaactgtggattcttacttgatgttgagaacgtggttcacagccgagagattgctcgttgatgaatgtttcttggtccatgctggcttggtctatgcagctgccaccttggcacgagtgaaggaagtaatagcttttggtgatacaaagcagattccattcgtgtctcgtataccaactgtcaaactcagacacgcgtctgttgttgggacgttgaagccaagaacaattacctacagatgccctagggacgtgacggcagtccttagtgagaaattttatggtactaaggttaagacgtttaatcttgttaaacagtctttggaattgaaaaacatagattctagtaccgaaatacctgtagaaaaggatacgctatatatagcgcatacccaagctgataaacatgctttgatgcgtttacctgggatgaatggtatagaagtgttaactactcatgaagcccaagggaaaacaagagaccatgtgatacttgtgcgtttaagtaaaactaccaatttattatattccgggaaaatgcccgatgctggtggttcgcacaatcttgttggtctgtcccggcataagaaatctttgagatattttagtgtctttgccgatgatccagacgatcaaattgcgactggaattcgctggtccaaaacattggatgagcaagagttagcagcttatagagctgctggttagtgttttatttataaaacctggttaagggtcctccgggatgtgctcagcacctagcctaagccaagtccatatgcccacctatgctgctccgggtggatgcttatacatgctatggatgcctacatttgaaataatgtagatgcctaatactctctctcagggagagagtttagatgcctccaaaggagatgc

SEQ ID NO: 483 - DNA, 2939 bp, Spinach latent virus
  source 1..2939: mol_type = other DNA
gtattgtgcagtattattttacgcacgacccggattaatcatttttgtgagaatatacccgatagctctcaatggattcttaccacttcttatctcagttgtgtgacttgaatgttctgactcatgcgctttatgttaatcaagtgtttgagattgtggatcagtccacaactagttatatgcagatgtggctttattcccgtgttattgtcccagttttgaaatatcatctcagtggagatattatattggataaattgcacgatgtgttccttggaacctttcgttcaatgatggtgccgatgattatgttgaaccgactttcattcgtcgtgaagatgacgacgatgaaccaccaccggaaagcgtatttgccgcttgaagaaagggaaaaaattcatgctgcgacgtttcttggtcatgatcattgggcaagcgttacttcgggatcatctttttatgatgatctcgaaattctcgctgatgagaccgtgaacgatgatttgcattttgataaagaatcttccatgccagatgagtatcagatcatgtggaatgatggtacaattgattccgtttggtctagtcagtttgaatgcgaagaaccaccgaaaccgaaatttataccacgcccttctgataaggtgtgtgatccagtggttattcaagatgccgtgaacgatatattcccatttcatcatgagatggatgatcgatatttccagacgttagtggagacacaggatatttcccttgaggtttcgaagtgttggatagatgcctccaatttcagagattttgttaagggtccaaattcttatgttgagcctgtgtttcaaaccggtgccactagtaagagagtgcatactcaacgtgaggctcttttagctgtgaagaaaaggaatatgaatataccggaattgcaatccactttcgatcttgatgcggaagtcaacacgtgtttcaaacggtttctcacacacgttgttgatttgccacgattaaaaaggttgcaacctatgactggtgttgaggtggaatacttcaatcaatacttgcttgggaagaatccacctgtgaaggaatatcaaggtcccttgacattgactgcacttgataaatatatgcatatggtcaagacgattgtgaaaccagtcgaggacaattcgttgaagcatgagcgacctttgtgtgccactattacctatcataagaagggtatagtgatgcaggcctcacctcggtttttgagtgctatgtcaagattggtttatgtcttgaaatcaaaaatccatattcccagtggtaagtggcatcaacttttcacgctggatgctggaaaatccgatgccgtaaaatggtttaaagaggtggatttttcaaagtttgacaagtctcagggcgagttacatcacaaagtgcaggagaagatatttaatgctttaaagttacctcccggatttgttgagatgtggttttccgcccatgagcgatcacacattgtggacagagaagcagggattggattttccgttgattatcaacggagaacaggagatgccaatacgtatttgggtaacactttggttactttgatttgtttggctagagtgtatgatttatgcaatcccaatattacctttgtcatcgcttcgggtgatgattctttaattggaagcgtcgaagaattaccgcgcggaccaggagaatttatttacaaccctgttaattttgaagcgaaattccctcataatcaaccatttatatggctcaaagttttagtaagtgttgatcttgaggatggtggaagagaagtgatcgctgttccaaaccctgcgaagttgttaattggtatgggaagacgagactgtcaataccaagctcttgatgatttgtatcaatcatggcttgatgtgatatattattttagagatgctcgcgtgtgtgaaaaagttgctgatttgtgcgcatatagacagacgcgaagaagctctatgtatttattaagcgctctgttgagcttgcctagttgttttgctaataagaagaaatttaagtggctctgttatcgtttaagagagcaagggtgtctgaagaaggatatttatcctgtagcaaaacctataagtgcccataatataaggaaagaagattcaaatggatgcgatgttaatcaaggaacagatgattcgttctcacggaaaaagaatcgtggatgctgggagtatgtcccaaagatgttgcagactgatgtgtctgttcctgttactgataaatctttccacagtaacagaggctcgtcggtttccccaaccgattgcggtgatggagggtgctccagatccgccagctcgattggtagtaaaaataccaaacctcgccatagatttcgagctgcaggagttcaccaacccagcggtcgtgatccagaccgtataccgccgaatcatcgacgaagtgcctaaaggttggtatggtttaaagtcctggtcttcctccaattatggagacgttgtggccggactaaaaagggctgcacgagttaaagtgcatttttctataccgggttcagattgggcttataccttaaatctgtccgaagtggtatctgggttagcactccccaaattaccaattcccgagaaatatctcaggatgccgattgctatcacaatcgatgataccgtcaataaaattggcgatggttttgatgatgtaccatctccatggtacttgtatcaatgatgtgttcctttcatggaacctagtgaggggccctccggggtgtgctcagcacctagcctaagctaagtccatatgcccacctacgctgctccgggtggatgcttatacatgctatggatgcctacatttgaaataatgtagatgcctaatactctctctcagggagagagtttagatgcctccaaaggagatgc

SEQ ID NO: 484 - DNA, 2735 bp, Olive latent virus 2
  source 1..2735: mol_type = other DNA
gatatttcgcactcctagtgaatcttcctagtatatccgttgaaaaaacgagagtgcaacaacaaaaactacagagttctttttttttaaaaaaaaaaaaaaatcaaagagacatggccggagtactttatgatgaggagtacgttccccaggaaccggattacttgtattgcccgtacgagtgggagggtgaagatcctacccaatgcgatgcaaatgttccgtccgtcagctaccttgtggaggctgtaaaaaaatcctttactgagggtaaccacgatatgctgatttcttgcgagtcgtaccacgccgagtgttgcgagggtcccttgatgaacaagggtttgaccctctcgacttactttatgagttatccgggcatttcattacctgcgttcggcggtggtgtgattcatgtcacttcagctcgcgtctgcatgcaagctttttatgccgtgaccccaggaaggtgtagttgttcgtgtggtacgcaattcatctatcgtgccaaaggtggaactggtctaacatttgacgccacgaacactatttctagtgcctttaagttcgaagacgggaaagtgaaatggttaacagaagacctaggcttggcattattggctggttgtttcttgaaatacgtgccaatacctcatgagattgaaattaagatcgaaagaaaggtcgagcccgtgtctgctctggatttttgggaaccagaaggattgatttctgacgtacatttcgtacatccgcaagagagagccttggctcctgagcctccaatggatgtagagatggtgagattagtccgtacggaattgtttgaacactttaatcccacccttcttctgaacgctcggtcggatttttccggtgagaaactgaaagaggttgagttgccacgagctcaatcggaacccttagtccctagggtctgtctcccgcgaggtgatgacgctttaattgatcagtttttcatagacaaggcacccgagcattttaatcgtgaacctgccacagatcaatggcaggtggaatctgatgactttactgtggatttccccacccaagtgcgattacgcgaacgggacgaagattggttcagaaggaaacccgatttcgctgtgtcgtccattcgtacaggtctcgagatgcctcgaattgctacaaagaaggaaatgttaatggcattctcgaagagaaacgttggagctcctcagatggtagaggtacctcaggagatccacgtgaagaggttggctgataggttcttccggacattcttgaaagaaggcggctgggataagggggatggtcattattgggatgattttttccatagaaagggtcgaaaggtcttttcattggagaattgttacgatgaccccttgtcctcatacttagttatgctgaagtccgctgggaaattctctctagatctgaactttccggttcgatcggtaccccaaaccattacttatcatgagaagtgggttaccgaggttttttcccccatgtttctgcaggtgatggcaagatttttctctcgtctgcaagattgggttgttgttccggctggtccgatggctgacttctcccgtgtttggcctagctttgaggggaagtgtttaacagaaattgatctgagtaaatttgataaatctcaaggtaagctgttgcatgatgtgcagagggagattttcctccgtctgggtttcccacccatttggtgtgattggtggtttaaattccacgagtcttcctatttaaatgataagaaccttggtatagctttctcagtagattaccaacgtagaacaggcaatactgccacttactttgggaacacgttggtaacaatgattatgatggccgaagtgtatgaacttgattctctccctttctgtggtttgttttcgggtgatgacaacttgatcgtgactgatcgacctcttgaaggtcgagtttcgttattcccgaacatgttcaacatggaggccaaggtgatgcgtccgggtcagaattacatgtgtagcaaatacctttgcactgtagacggtcgcgtaacccctgtccctgatccttttaagttgctgaagaaagctggtgcctcgtgtcctttggagcaccttgatgacttttacgaatcgtttctggattataccaaatacctggtgagggatgaagttagaacattaatacccaggttgatggcccacaggtatcaagtctcgatggatgaagctggagttgctcttgatcagattatgagctggcgaaagtcaaagactcaattctttaagcatttccagtacaggaaaccaatcaaggactcgctcgaggctgtgaaatccgacttcctttctgctttcggaaaagtagatgatcgaataagagtttggcgcgggcgtcgaaccaatcataagaaggaggtcgatgctttaaaggtcccattggtgagttttagggagtgatggtggctcgcctagagcggtgtgctggtttctacctaaggaaccaggagagtggagtgacttggtcatgacaagtcgagtagtactttaactacgagtcgtcgttgagacgccggtccccttccaaggggatcgagagggttttcccggtactttacccgggattcgaattgagctgtctttgacagagctcaaactcctcgctagatactctaacgagtgtcttgaggactctcctatggagagtcagtaaagacc

SEQ ID NO: 485 - DNA, 7531 bp, Citrus yellow vein clearing virus
  source 1..7531: mol_type = other DNA
gaaaagcaaacattatcatacacaccccaaaaattgtgatcatcgtctctgcatcaacagctcagctaagaaccagagaaatggccactattaggggtgccatcgaacgcattacagacaccaccgtacgcactacacttcaagaggaggcatgccgccaaatacgcgctgaacttaaaaacgtcgaacacatcaaccgttacgctatacagcctgacgccgccgacgcactcgaacacctaggcattggttctaaccccttctctgtggcactgcacacacacggtgcctgcaaagcgattgagaaccaattactctatgtagttggtaccttactcccaaaagaacgtgtcaccatgctcttccttaagaaaagcaagctcaacatcatgaaacgctgccctaaattccaagacatcttcctgaaccaacatattgaaccacgcgacgtttctaggtactgcgactttaacgtccaatccacctccaccagcatacccacacgaacggcttacatcagtgacacactccactttatggaccgtagagacctagtccgactattcctaaacagcccaaatctagagactctctacgccaccattgttctcccagtcgaggctgcttacaaacaaccgagccgctacccagagatataccagattaactatgacttcgacggtttccagtacatacctggaggccatgggggcggcgcctaccaccacgagttcgaacagctgcaatggttagacactggccatatccactggcgtgggcccgactgtaaagagattcgcatgacaattaccgcccaaatgctcgaaagcttaggtgcgaatcatcttttctgcttcaaacgtgggaaactactcaccccacgtgtacgcactttcggccgagatacccaagtgctcttgcccaaaatcttccgcccggccgacaaaaactttaacagggcaataccactaaccctagctaacaaactactcctgtacgctaaatccattaacacagtgaccttccgcgacgtcgttgccaagacacgccaacttatgaaggacaaggagcttgaaacatacaccggcaacgacctgttgcatatggccaactatttcttcgctgttggagcactgtcaggagttaactcctatgaccaattgcttggcctatccgcctgggaagcctgcaccgtccgtatcaagaacaccataacaaatctctgggaaaagattgccggaaagaaagagttcggcaagctattggaggcccttgagtgggaaacattcacatactcacgtcaagtgaccgaattcaccgttacgggactgcccgccctgctccccctcccagacatctcagaccaagaagagattttcgcccagcaggacgagttagacaaaatcactgccggcgctaccaagatacggactattgacattatgcggggacaagctaaccgcgctaacccaaaaactccgatcaactcaacaccggcccagggaccccaactgcccgatacccccgacccaatcgaccaagctgcctccaaagacctcgtcaccaagcttcagaaaaacaaacgcatttacatccaagacgacgggccggaataccttatgggacacatggctgaagtccctgcctggtatcttgaacaagatgataccaccactagactcaaaaaccgctgcgcttggttcttcggcccacccacctacagatatgggcacaacgacattgagtacaccaccatagaatactacccttgggtcgagcgtattggagccattttcggcaagtacaacacctgtcttgctcaaacttacgacgccggagcccgtattggataccacgctgacgacgaagactgctacgaccccgacgtcaccgtggtcaccatcaacctcactgggaacgccaccttcctgctcaagaccccaaccggcactaggacctggaaacttaaacctggtgacttcattatcatgaaacccggtgcccaaaggtgcacaaaacatgccattagagattgcacaactaaccgcacatccttaaccttcagatggcaggcccgcacttgccccactaacctcagaaagatcactaacctacccaaagccaccaaccaaccccaaaccactgaatggcgtcctgtaactaaaccacgccctagcaccaccgcttccagcgacacccagaccccacttgtcatagaccaggaacgagggtataccaccacctccgacgtgacaccaacgattaggctgcccgccgaaaatggtaataacaccggtgctggaccctcctccgcattaaccctcgccgacctgaatgataaccaagcgccgaccactaacaaaggaaaagagaaacttgaggaaatggtcgaaactggcccaactatcatggaacgcttcctcaacaccgttcaggaaccaacacaagatttatgggactccgcctctgaatccgccgcgagctacctcgctgaaggcctcggcatctctgccatccaagcactcccttgggcacctcacttggaactcatcaatgcattaggcttccagggcactgaaaggcaatacggcccagacaactgtctcatatggcctatcacgcattacagagaattgcccagaagcaacaatgtcgaagcccctccggaagtgcttgagctgctcgactgcatcaatagataccccactgacgtcccaatgctcaaaactcgagccgccgccttcggttcagacgtcaagaatctacgcataggggcacttgttaagaaccaggacaaacagtggcgcgcatcactcgcactactttgtgaggaaaatgaacacctcctccctaccactgtaatacacggcgctggtggctccgggaaatcccacttactccaacagtgggtggcgtctactgagcgcggaaatgtagtcaccatcttgcccactatcgaactccttcgagactggcaaaacaaatgtccacatgcaccgaaagagactttcaaaaccttcgagaaagcgctcatccagaacagcgcccccgtggttatcatggacgactactctaaacttcccccagggtatattgaagcctacgtcagcctcaagggccagtgcaaacttctcatactcactggagatcctagacagagccactaccatgaggagaaccctgaggccttaatctctactcttgaccccgccacggactactttggcaaattttgcgcatacaacatcaacgccactcatagaaatgccaaaaccttcgccaatgcgcttggggtgtactctgaaaaagaaatccccaccaccatcacctgctcatcctaccagaaaagcggttggccaacacttgtcccatccatccttaaaagaactgcgctcaacgacatggggcagcgctcactaacctacgcaggctgtcagggactcaccaccccaaaagtgcagatagttcttgacaacgccacaccactatgctctgacaaggtcatgtacaccgcactatctagagcggtggaccaaattcacttcttcaacactggcccaaatcacactgattactgggaaaagatgaacgccacacctttcctcaaaactttcatcgaccacacacgtgaggagaccttcgctgagcaccaacctgccgaacccacagtgcgtgagtacgcaccagcaacgcatttcccaccggctaacgagaacctagcactagagccgtgggtcgaaccgctgactgataaacactcgcgggaactcttccactctgccttaggccacagcaactgcgtccagactgaaaacaccgtagtccaactttttccccaccaacaggccaaagacgaaacgctcttctggaaaacaatagatgccagaatcaagataaccaccccagaagagaacatcagggcttgcagcatagccactgacattggcgacatcttgttcctaaattacaaagaagccatgggtttaccacaagaccccatacccttcgaacaggcactctgggactcttgtcaagccgaggtgcaactaacctacctcagcaagcctctggctgcactcgcaaatgccgcccaaagacaagaccccgactttgactccaacaaaatccaactcttcctgaaatcacaatgggtcaagaaagtcgagaagatgggctgccttaggatcaaacccggccaaactattgcttccttcatgcaacagactgtcatgctatacggaactatggctcggtacatgcgccgcatccgcacctcactttgcccacccgaaattatgatcaactgcgagaccaacccaaaccaaatcggaacatgggtgcgtgagtattggaacttcaacacccagagccatgagaatgactttgaagcgttcgaccaatcccaagacgccaacatgttacaattcgagctcattaaggccaaataccactcaatccccgaggagatcatcgccgggtatcgacacctgaaatgcaacgcccacatcttccttgggactatatcgatcatgaggttgtctggtgaagggccgacctttgacgccaacacagagtgctccattgcatacaaccacacaaggtactttgtgccgaaaggcaccgcccagctctacgccggagacgactctgcatgcgcgtcgcccctctctgaaaaacccagcttccaacatatctcaccagagctcagcctcaagtctaaggccaagattagaacccaacagaaaggagactttgcgaccttctgtggctggctcatcactccaaaaggcctgatcaaaaaccccacccagctttacgcctcctggttattggctaagcacaacaaagatctcgcggacgtggccagaaactatgccttggacttacgcattgcctatcaacttaaagacgagctctatgagttattatcacctgaagaacttgaccaccaccaactgctcgtccgagagatgatcaagcacaaaatgggccatctcctcaacctccctgaggggtttaaaacaaactaactcgaaatggacttacctgagctcctgctatccaaaaacttcattcgcacccggttacccctcgccaaacccattgtcatacacgctgttgccggcgccggcaagacacaacttcttgaagaattcgcgcggtcctcaccctcaaccaaaatctactcacctgtgaaacatcactccaactcactgctgctctcgcccttccacaaagctctctctgaagcttccattgtcgacgagtaccctctaagccagatacacgagaacgtcgagtacatctttgctgaccccatccaataccttggtaatccaaaccttagaaaaccccactacatctgcgcgtcttcccatcgatttggccattccaccgccgctctcctaacaaaacttggcattgaaacttacgcacataaagaagataccgtccgggtagacaatatcttccaggctgaaccagacggccaaatcatcgcctgcgaccgacccactcaagagctggctgccaaacacacactagactacctgaggccctgcgaaagcataggactaactttcccacgaaccacgatcctgatctctcacgaacttactgcagacaccctcaccaaagagatttacatcggtttgacccgccactctaaccaccttctcatactcactccggatgcctctacaacctcctcctgaccacacttgggctttccgactactagctcttggcgccgccttagcactgctcactttcacgctcaaccgagacacaagtcgtcacgtcggagatccttctcactcacttccttttggagggtactacagagacggcagcaaagtagtccattataactccccgagagccacaaaacctagcaccccttccttcctgtacctggccccaatcttactgatcctactaattcatgcagtcaatagatttactaatcctcgccattcttgttcttgcactcattgccagcctattccccgcacctgaaccttgcacaattgtagtctctggcgcctcagcctccgtaactaactgcccaaaccccgaacaacttgcagagctagtcagagcgcttaaaccggctaaaccggtttaaaacttaacacaaactcgaactcatgagcttcgactacactcaccctctctaccgcagctatccatttccacactactgcgagttcgaccggcaccaactctgcgaccatcatccagtactcaaacctccaactcacaaacccagcgccccgaactctctcatgtctaccaacgacaacaagggcaaagaaccacttcacccgacaccttcgggccctaacgacacgaccccgaaacctatccccgtacccactccctcagttacgcccacagctgcaggtaaggaaaaccaagaacccatcgaaaagcgtatcacacacgctttccacgctgaagcaaaaacccacaacaatggggtctctccacctgcctttaacccgaacaacatgaatgctgtgccgctgaacctgctcaacctcaacctaagatactcaccggtcactaactccatagctaaccctaaacagactgaggctatcgggaaagcttgggtccgcatcttgaacatcgatcctgccaacgtgttcttatacgccatcgacctcgccagagcttgcgccgacgcgggctcttcccctgaagctgatattattggagcgaacgaagatctcaaccccgttgttgaacgaaacgcattggccctagtggttagggatttctgcccgctgcgcgctttttgcgcttactactctcgggtggtatggaacctcatgatcaaggcggaccagcctccggccaactggatgaaatccggggtagacgagaacgcgaaattcgcggcattcgacttcttccatggtatcctctcgcccgcttccctgtatgtgcccctagagagacaccctacttccgcggagaggatcgcaaatcaggccatgttcgctgtgaaaattgccaacgctccaggaaatggcacggacctcacgatggaccacgttgccttcaccaaaggaaggactacccagcactccggcctccgcccgacccctttcaacatctaaccacctttgaaccaatactcctagcatgcctacaagcccttaaaccacttccccccgaaatccaaatagctatcatttcgtgtgtgtgtgacttctttaatttcttacgctgtgccagtagcaagtaccagggcaccagccgctcagctgttaaacgtcgagcggcccgcctgaactactgctacaagtgtgggcaccccttatatctaaataaacctcacccctgccgaccaggtcaattgtgctctgcatctatctccgagcgcctctgtttgctccacacaggaccgattaggtttctaaccgaaaatcctgttagtgccagagcagctcacttcctagcgcacgagctccttgaccccagatgaaacataaatattcaggctttcagtttccattttctg

SEQ ID NO: 486 - DNA, 7890 bp, Potato latent virus
  source 1..7890: mol_type = other DNA
tcggataaaccaaaccaacaatatttacacatactcaagttaaacatacactgttcaatcttgcgtacgttattatggctttgacttacagaagtccattggaagatattgttggtgcatttgaaccaagtgttcaaacagctattgcgaacacagctgctaaccactacaagcagcttgaggaagagaagggaatcttatttaattatgcattgccacctgaggccaaacagaggttaataggcgctggcatatatttaagtcccttttccgctgttccacattcgcatcctgtgtgtaaaattttagaaaatcatctgttgtatgtagagcttcctagtagactagataattcttttatgtttgtaggtattaaaaactttaagttggatctgctcaagcgcagacatgcaaatctaagcatgatccaaactatcaatagatatgtttgtagtttagataaaataaggtacggttcaaatttcgtagttagatctagcgctagttatccagagctttgcagacgcaaaggtgagcttgacggagcagtgttgagggaattggtgcctgagttgatgattaaaagcgctaagaatctattcttgcacgatgagcttcattattggacccatcgggatctgattaccttcttggaggtactgaagccagacaaactgttgggcaccttagtttacccacctgaattgctaaagggtgcgaagaaaagtttgaactcttggtgctacacatatagagtggacaaagacaaattgtttttttatccagatggcgtccattctgaaggctacgagcaaccattgagtggcggttacctcctcgaaacaagtaggattaccacacgtgatggtgaagtttattgcgtcgatgttgtgtgcagtaaattcgcgcatcatttgattgcaataacccgtggtgatctgattgtacccacacaacgcagttttgctccctttgaggccataactagtaaaggtttgaataacttggtgaggggcaaggtggaatgtttccccgtatgcgcaagtgtagtgtctaaattgtataggtatttgcgcacactcaaaaaacccgatgagcaatcagcaatggccaaattgagccaacttcaggcaaatcccactggggaagagatacatttcatccagggctttgccaaattggtgataaatacaaacaaaatcgacagtttaatcaactgcgatagtattaaggtgttcatgggcaaattgtttggtccgttgcccaattggcttaccaagagattgaggagcgtgcaagaggtgtctctcgatgaatttgtccattactttgaaccatatgtcgtcaacgtgcccactaagcatgtgaactatggttttgagttcaattacgtaatggaagatttcaggtacgagcagggtgagaatgatctagtggatatgctagacaattttgatggctccacaaagatgagcacaagcctttgcatgatgaccccatacgtcggcttagcaccattgaccacgcgacgcaaattcctatgccatatcgaggagaattccatattcagagtggtgtctaggaacatcttttgtagctacacaaatagttacaaagtggccgtgagcactgagggggtggttcggatacttgagatttatagcaaagtgtctgtggatctactgggagcgtatttgggaaaattgctcaagaaaacagagttcatagagagagtgcgatcaagggttaaggcaattgccataaagcacctcaagtacacttggcaacaggttggtctagcttggttcaccagtggaaggcgtggctacacaaaatacattgattgcagcccatacacgatgaataccttcaaagagcttaaagagagatggggtgtgattgtgcgtgaattgtctaaacagcaggacaacgctgaagctgcgaaaaacatacctgagcaggaaattcaaacgaccagcaaaccaagttgtgtggagaagcgaaattacttctcgaacactttgatgactagctttgctgcgtcaggagtgaaaggcaaggaacaggtgagctccgaaattgccaagggtaggggtgaaaggagcgaattgagggcaactaaattgatgggctcatgcagcaccctcggcaaagtggctcacatagcatcaagaaaaggctccatgggggtattggaatgtgtagcgagggtcatcaaattggatttccaaaccgccttgaagttccttagagtcaagggtgtgtggatgcaggagtatgagagcataggcgagttggaggaggagcagatacagagtcctgcatatgatttttgtgctgcgatcgcaatgaccttcaatgttgaaattgaattgacgttcccaggctcagagcttgtttaccacttcgctgcaagttcaactgtgagttgtatccgcttgagcatttgggaaggcgtagtcacactgatgagggctgaaaatgattgcgttatcactgcatgtgcacaagctttagctagggagcctgaggatgtagtgaaggtgctcaaagatagattggaggagagcatactggaagagatttggaacggcgaaggggtgcctttcgagagaatgtatctcttctttgaagctctggatattcaagcacattgcaatcgcgatggtgcacagctagtgttgaatggcgggggcaagctggcgcgatgtttcgtgattaaagaagatcacatcgagttcgcaggtgagaaaaaggtcagtagagtacttgagctccaggatgctagaacaagtagtaaagcagacccagaattggtcaaggagtttcagaaagccgggactgtggtagaatatgtagcagtgcaatccagagcgcaagtcctggcgaagagtctagtggatgcaaccactggggtgtgcagctcaaccatattcaatgactgtgagagcttggaacgttcctttagattcaccgaaagcgaactagcgcgaaatgtttgttgtgttatcggtacgtttggggctgggaagagtaccctgttcaaggatatgatgaggcagtgcctagggaaaggtgttcactacgcatcacctaggaaggtgttggcgaatgagctcaaagctagtttgggtttggcaaaagggaagcggaatcgaaaagtagggacagagaattggaatgtgcacaccttcgaaagtttcctaaagaaggcgaaaaatgttgcagagggtgagttggtgatcattgatgagatccagttgtacccgcctggctacctggatcttctactttacctcatacctgagttcactagcgtcttcgcggtcggtgatccatgccaaagtgattatgacaacgagaaggataggcatgtcttcttaggggttgagacagatgtctgtaggcttctgagcggccgtgagtacgaatttaatgtactttcccgcagattccacaacttaggctttgaaagcagattgccctgcagattcaaattcccggctggagcagtcaaggaagagtatttgttcgttaattcaatgactgaggctaatgagttggacagcgcctacaaaagtgtgtaccttgtgtcatcccacttggagaagaaaatagtggagtaccagagtgacgttaaaacgccgaatgtgctgacgtttggtgagtcgactggttgcaccttcaagtatggttgcattctcatcacgcaagtgagtagcgcatgtagtgagcgcaggtggatcactgctctatcgagattttctcacaatctctgtttcatcaatgcaactggtgtgcccatagaaaatgtggcgaagagttacaaagacagaagtttgggaaaattcctgtgtggaactgctgttgagggtgatataaaatcaatggcttatgggaccccaatcttcaaagagcagttcatcgccggcgttgggcgcgatgaaggtgtcaaggaggataaagtcaccggtgatccttggttgaaaaccatgttggatttgatgcagctcccagatgttgaggaagcagagatgatgcaggaagagatgcaagaagagtggttcaaaacccatttgccacaagaggaaatagaaggggtcagatgccgctggattcacaaaatgctagctaaagaagcgagggaatgtagaatgggatcgatcgtttcagaccaattcccagatgatcatagcaagcaagaggggaagcaaatcactaatgcagctgagcgttttgaagctatatacccaagacatcgggcaaacgacacagtcacattcattatggctgtgaagaaaaggctgagattttccaggccttctgttgagaaagcgaagctcacgcaggctgaatgttatggaacttacctgctcaaaaacttcttggatgtgatcaagctcaagcccgcacatgatgaggcaatgatgatcagagcgaaggaagattttgagcagaagaaggtgagtaagagtgctgcaaccatagagaatcacagtgggaggtcatgcagagattggtgcatagatatagggcagatcttttcgaaaagtcagatatgcaccaaatgggacaacagaatgcgggtagctaaagcagcacaaacgattgtttgctttcaacatgccgtcttgtgccgctttgctccctacatgaggtacattgaaatgaagctgaaagaagtgctgccggctcggttttacattcatagtggcaaaggtttagatgagctcaactcttgggttaaagaaggtaggtttgagggagtgtgcactgagtccgattatgaggcttttgacgcttcgcaggaccagtacatcgtcgcttttgagttggcactgatgaggtaccttaggcttccaaatgacctgattgaggattacaagtacataaagactcacttgggttccaagctggggaattttgcaatcatgcgcttctctggtgaggccagcacttttctattcaacacaatggcaaacatgctcttcaccttcatgcggtatgagcttcatggcgatgagtacatttgctttgctggtgatgacatgtgttcatcaaagagattgcgaatcaagaaaacacatgaaagctttcttggaaagctgaagttgaaggctaaggtgcaacacactgagaagcccacattttgtggctggaatttatgtgctgatggaatatacaagaagccacagctggtctttgagagaatgtgcattgccaaagagctcaacaacctgcacaactgcatcgataattacgcaatcgaagtggctttcgcttacaaacttggggagctggctgttaacaggatggatgaagaggaattgggggccttttacaattgcgttaggctcataacaaaattcaggcatctgctcaaatccaatgtagtggaggtctttaagcgtaaatagttgttactttagcttaggttagctactatagatttgatatatggatgtgcttgtgaataaagctttagagtttggtttcaaaagattgagttccgtgctgaagagtccgattgtgtttcatagtgtgccgggtgccgggaaaacgaccttgataagagcgctgcttaactcagacagcagattcgagggttggacgctggccgagggagacaagcctaaccttgaaggagtggtaatcaggaaatacgttggtggagaagttggtccctttgctctattggacgaatattgcgtggaaccggaaattgccggtaaactttacgctgtattcggagatccgctgcaggtgaacaacattggtttcctaagagcaagctggattaaagtggaaactcaccgcttcgggaaagccaccgcgcaattgctaaatcaattcggttttgaagtcagttcaagcaaggcggacattttggtcattgctgatatttttgtgggtgaacctgagggaacagtggtgtattttgaagaagaggttgggtgcttactaaagcgacatagcttggaggccgtgcacattgatcttgtgaggggcgatagttttcctgtagttacatttgtcacatcggaaaattgcatgatattggataaggtgcgcagtttcaattgcttaacgagacattctgagaagttgatcatcttgtgcccaaatgccacttactcccccacctgattacaccaaagcaattttggccgcttgtatcggtttgtcattggctttgctcgtcggagtttactctcgtagcaccatacctgccgtgggagacaatttgcattcattgccgcacggcggaacatacctggacggcacaaagcgaatagtttacggcgctccaaataagctgaattctctggagggccaacgaactttatcaggtcaaccttgggccattgttatcgtgctgatagcggtaatcatattgttgagtcgattcaactccacttgcgcacactgcggtagatgtcattgaccgcaatttatttagccattggtctgctagtcttcagcgtgtctgtgtatttaattcagccaaatctgcaggattcgtgctcgatcgtgattactggggaaagtgtgcgaattctcaattgcagggtgactgaggccctacttcgatttgcactggaggcagagcccaagagcgtgaagatcccttaggtttactgggtttgatttgaatatggatcagaaaggaaaacaaagtgagagttcaagtcaagctgtggcccctgttccaaaaccaccgctgccccctccgatcaggggcgaagaggcggttaatgaaggcaatgaggaggcgaagatggagcgacgcctagctctcttgcatcagcgcttgaagggtgagcggaatggcacacgcattaccaatccgagctttgaaataggaaggcccagtctgacgaggcctgatgatatgaggagggatcccgccaacatattcagtaggttgtccatcgatgatctggcgcagatcaagccaacacctgtgtccaacaacatggctaactcggaggaaatggtcaagatcgctgtcgctgtggaagggctgggtgtacccactgaacaagttgcaaatgttgtactgcaggcggtgatttactgtgctagtgcaagtagctccgtgtatctggatccacatggtacaattgagtacacagggggagcagttgttcgtgattctgttgtagccatcatcaaaagggatgccgggttgaggagggtgtgtcggctttttgcgccgttggtctggaatcacatgttggtgcacaactcacctccctctgattgggctgctatgggcttccaatggaatgacagatttgcagccttcgactttttcgactatgttgaaaatgaagctgcgatacagccgttggatgggttgattcggaggcccacaaggtctgaaaagattgcgcacaacacacacaagcgacttgcactagacaaatcgaatagggatgaagtgttcgcaagtttggaaaccgaaatcacaggtgggaaaagaggaccagaaatcagcaggaatttccgaaatgcagccaattagccactatgaagccaagctcctagccgtgtctttagctatgtataagtttacgggacgttgtgagcccgctgttgctttaaatattgttaataaagcttgtaatgttggtatgggcaagagcagcttcgcgcgcaggcgtagggcggctctcctggggcgttgtcatagatgctttagaacttccatggccacacgttgcaatggtgtgacttgttatccgggcattggagctaagccaaaaatcgagatgttcatcaaatacggtgtaagtgagctgaaaccgtaattgagttgtgcataaaacctaattaattttaagtgtgcaactataaaataaataaagttttaaatatttttccttt

SEQ ID NO: 487 - DNA, 6495 bp, Apple stem grooving virus
  source 1..6495: mol_type = other DNA
aaatttaacaggcttaatttccgcgctttacgtcaatggctttcacttacagaaaccccctcgaaattgcaatcaacaaacttcctagtaagcagtctgatcaactgctttccttgaccaccgacgagattgaaaagaccttagaagtgaccaaccgcttcttctctttttcaatcacaccagaagatcaagaattgttgactaagcatggtctaacacttgcacctatagggtttaagtcacactcccatccaatatccaaaatgatagaaaatcatctcctgtatatatgtgttccgagtcttttatcctcctttaagtcagttgcctttttttcacttagggaaaataaagtagacagttttcttaagatgcattcagtcttttcccatggaaaaattaaatctttggggatgtacaatgctataattgatgggaaagataaatataggtatggtgatgtagagttttcatcttttagggatagagtgattggtcttagagatcaatgccttacacgtaacaaatttccaaaagttctgtttcttcacgacgagttgcactttctaagtccatttgacatggctttcctatttgagacaatcccagaaattgatagagttgttgcaaccacagtttttccaatagaacttttattcggggacaaggtctctaaggaacccagggtttatacctacaaggtccatggctcttcattttcattttatccggatggtgttgcctctgagtgttacgaacagaatttggcaaattctaaatggcccttcacctgcagcggcatacaatgggctaacaggaaaattagggtaaccaagctacagagtctcttcgcccatcatgttttctcatttgacagggggagggcttgtaatgaatttaatcatttcgacaaacctagctgtctacttgcggaagaaatgcgccttttgaccaaaaggtttgataaagcagttattaacagaagcacagtctcttccctcagtacatacatggcttgtcttaaaactgcaaatgcggcttcagctgttgccaagctgaggcagttggagaagagggatctttacccagatgagttgaacttcgtctattcctttggagagcatttcaaaaattttgggatgagagatgactttgatgtgtcagttctacaatgggtcaaagacaaattttgccaggtcatgcctcacttcatcgccgccagtttctttgaaccaacagaatttcatttaaacatgcgcaaattgttgaatgatctggctactaaaggaatagaggttcccctttctgtgatcatcctggacaaagtcaacttcatagagaccagatttcatgccaggatgttcgacatagcacaggcaatcggggtgaacctagatttactggggaaaagatttgattatgaggctgagagtgaagagtacttttcagagaacggttacatctttatgccctctaaatcaaatccagagagaaattggattctaaattccggttcgctgaaaattgactattcaagattggtaagagccaggagatttagattgagaagagatttcctagatcccatatctaaaggaaaatcccctagaaaacaactcttcttggagtcaacgggaaacattaaatcaaatcccaatgctgaaaaaaatagcgagagcggcgaaataaagattgaaggcagtgccgaaaatgatcagccacatgaggtatcacatacttcaatggaaaccgaggatggacagggttttgaaggttcaataccagttgatttaatcaattgctttgaaccagaagaaatcaagcttccaaagagaagaaggaaaaatgattgcgtcttcaaggccatctctgcacacttggggattgactctcaagatttgttgaattttttggtaaatgaagacatatcagatgaattacttgattgcattgaagaggacaaaggactgtcacatgaaatgattgaagaagttttgatcacaaagggtctttcaatggtttatacttctgacttcaaagaaatggcagttcttaatagaaagtatggagtgaatggcaagatgtactgcacaattaaaggcaatcactgcgagctgagttccaaagagtgcttcatcagattattgaaagaaggtggtgaagcgcagatgtcaaatgaaaatctaaatgctgattccttgttcgaccttggaagatttgtgcataatagagacagggctgtcaagctagcaaaatcaatggcaagaggcacaacaggcctcctgaatgaattcgacctagaattctgcaagaacatggtgaccctttcggagttgtttcctgaaaacttttcttctgttgtcgggctaaggcttgggtttgcgggttctggtaaaacgcataaggtgcttcaatggattaattacactccaagtgtcaaaagaatgtttataagtccaaggagaatgctggcggatgaagttgaacctcaactcaagggaacggcctgtcaggtgcatacatgggagactgcacttaaaaaaatcgacggaacttttatggaagtttttgttgatgaaataggtttgtacccacctggataccttacactgctacagatgtgtgctttcagaaagattgttaagggacaaagtgaaaatttcttgaaaggcaaactgttggaattgtcaaagacttgcttaaacataagatgttttggtgatccattgcaattaaggtattactcagctgaagacaccaatctattggacaaaacacatgatattgacctcatgatcaagacgatcaagcacaaatatcttttccaagggtacaggttcggtcagtggtttcaagaactggtgaacatgcccactagagtggatgagtcgaaattctcaaggaagttctttgcagacatttcaagtgtaaaaactgaagattacggactcatcctagttgccaagagagaagataaaggtgtcttcgctggaagagttcctgtagcaacagtgagtgaatctcagggaatgaccattagcaaaagggtgttgatatgtttggaccaaaatctttttgccgggggagccaatgcagccattgttgcaataacaagatcaaaggtcggctttgactttatccttaaagggaattcattgaaagaggtacagaggatggcacaaaagacaatttggcagttcatcattgaagggaagtctattccgatggagaggatagtgaacatgaatcctggagccagcttttatgagagtcctttggatgttggaaattcatcaattcaagacaaagcttctaatgacctgttcataatgccttttataaatttggctgaggaagaagttgacccagaggaagttgttggggacgtaattcaacctgttgagtggttcaaatgtcatgtgcctgtcttcgacacagatccgacgcttgcggagatttttgataaggttgcagcaaaagaaaaaagggaattccagtctgtgctgggtctttcaaatcaatttcttgacatggaaaagaatggatgcaaaatagacatcttgccctttgcgcgacaaaatgtttttccacatcatcaagcgtctgatgatgttactttctgggcaggtgttcaaaaaagaattagaaagtcgaactggagaagggagaaatcgaagtttgaggaatttgaaagccaagggaaagaacttcttcaagaattcatctcaatgctaccgtttgaattcaaagtgaatatcaaggagattgaagatggagagaagagctttttagaaaaaagaaagctaaaatctgagaaaatgtgggcaaatcattcggagagatcagacattgactggaaacttgaccacgcctttctcttcatgaaatcacaatattgcacgaaggaagggaagatgttcaccgaagctaaagctggccaaactttggcctgtttccaacatatagtcctatttagatttggacccatgttgagagcaattgaaagtgcctttttgagaagctgtggagactcatactacatacactccgggaaaaacttcttctgcctggatagctttgtgacaaagaatgcaagtgtctttgatggattttcaattgagtcagactacacggcctttgactcatctcaggaccacgtcatattggcctttgaaatggcactgttacaatacctgggcgtgtcaaaggagtttcagctagattaccttagactgaaattaactctcggatgccgtctcggatcactagcaataatgaggttcacaggagaattttgcactttcttattcaacacatttgccaatatgctgtttactcaattgaagtacaagatagacccaaggaggcataggattttatttgctggggacgatatgtgttccttgagctctctcaaaagaaggagaggggagagagcgacaagattgatgaagagcttttccctaactgcagtagaagaggtgagaaaattcccaatgttttgtggatggtacttaagtccatatggtatcattaaatctccaaaattgctgtgggccaggatcaagatgatgagtgagagacagcttttgaaggaatgtgttgataattacctatttgaggcgatatttgcctacagattaggtgagaggctttacacaattttgaaagaagaggattttgaataccattatcttgtcataagattttttgttagaaattcaaaattgttaacagggttgagcaaaagcttgatatttgaaattggggagggcatcgggtccaaatggctatcgtcaacgtcaaccgcttcctcaaggaggtcgaatctacagacctcaaaattgatgctatctcgtcctcagagctttacaaggatgcaacctttttcaaaccagacgtgcttaattgcatcaaaaggtttgaatcaaacgtcaaggtttcctctcgatctggtgacggcctcgtcctgtctgatttcaaactgcttgatgacaccgaaattgattcaatcaggaagaaaagcaacaagtacaaatacttacactatggagtcatcctggttgggatcaaagcaatgttgccaaactttagaggcatggaagggagagtcattgtatatgatggagcctgcctggatccgaaaagaggccacatttgctcgtatcttttcaagtttgagtctgactgttgctactttggtctcaggccagagcactgtttgtctaccacagacgcaaatttggccaaaaggtttagatttcgtgtggactttgattgtccacaatatgaacaggacactgagttgtttgctcttgacattggagttgcatacagatgcgtcaactctgcaaggtttttggaaaccaaaactggcgattcaggatgggcttcacaggcaatcagcggctgtgaagcacttaaattcaatgaggaaatcaagatggccatcctggatcgcagatccccgctgtttctggaagaaggtgcaccaaacgtgcacattgaaaagagattgttcagaggtgacaaggttagaaggtcacgctcaatttccgctaaaagggggccaaactcaagggtgcaagaaaagagaggatttaggtccctctcggctagaattgaaagatttggaaaaaatgagtttggaagacgtgcttcagcaagcgaggcgccaccgggtaggagtatatctatggaagactcacatagacccggcaaaggaacttctgacggttcctccccctgaaggatttaaggaaggtgaaagctttgagggcaaagagctttaccttcttctttgcaaccattactgtaaatacttgttcggtaatattgctgtctttgggtcatctgataagacccagtttcccgctgttggatttgatacacctccggttcattataatttgacaacgaccccaaaggaaggggagactgacgaaggaaggaaggccagagcgggttcgtctggcgaaaaaacaaaaatttggaggatcgatttgtcaaatgttgttcctgaattgaaaacctttgctgccacttccaggcagaactctttgaacgaatgtacgttcagaaagctttgcgagccatttgccgatttggctcgagaatttctacatgaaaggtggtctaagggattggccaccaatatttacaagaaatggcccaaagctttcgaaaaaagtccatgggtggcctttgattttgccactggtctgaaaatgaatcgtctaacacctgatgagaaacaggtgattgatagaatgaccaaaagactttttcgtactgaaggacaaaaaggggttttcgaggcaggttcggaaagtaacctggaactggagggttaggagtcgtgtgaaattccgcaaacttggtcgcggtcttgcaggttgacatgcctgcctttatacttaattaaagggttcccccggttttctgagcatttccgggttagtgtggtttttctagagtctagagtttgtccactct

SEQ ID NO: 488 - DNA, 8747 bp, Citrus leaf blotch virus
  source 1..8747: mol_type = other DNA
gaaaagcaacgaaagcaacctacacaacccaaaattaatatattgcaataactgttatcactcaatataagccatggctttgatgagcaacaaaactgcaattgaatctattttgggtaactttgaaaagaaacacgtcgatgcaatctacaatgccgccgcacaaactatcctctctcactctgaatttaggaataagcattttgcttattcactcaattcttatcaaaagaagatagcctcaaaggtgggtattgaattgtatccaaatggttatttaccacattcccatccattgtcaaaaatttttgagaaccatttgctttttgatgtacttcctggcgtagtaaatactagtagattagttatgtgtagcataaaggagtccaaagttctggtttttaaagggattcgcgacaaatccagaagacaggtttcagacctcaatgccctcaattccttaaataatagtcatacatcattcattaataggttagttgcatccaaagatgtgagtagatatacggaagaagctgatgctttttttcaatccaagaaagggagtccggagctattttcaaggaatttcatcaaaagcttggaaaataaagaggctgttttttttcatgatgaagttcatcactggactaaggcccaaatgttctcatttcttaaaagcacgaaggtcaaaaggttcattttcactgtagtctatccaccagaaattctcaaaaaatttgccaattcccagaacccaaaggtttatgatttcaaagttgataagggtcggctttttttttttccggatggggttaagacagaggcctatgagcagaaattgaatatggagtggctcttttcagcatcacatcttcgcagtggagactgtgtatggactgtaacaagacataagagtatttatgctcatcacctgtttgagatatccattggcgaactagtcacggactcaaaactttttttttccgattataactccattgacatgtctaaaatatttcttgatcgttttcggagttatgaggtattccccatttcgattgagcacctttataaggtctactcttatctgctttgcctcaaaaaacctgacttggagagtggtctagctaaattaaggcaaattattggagatgatgtcgaaatcaaagaattcctcttctttgaacaattttgtaagcgcttaattgaacgccaaacctcttgggggctatttgggcactctttctttgaaaaattaaccgatatggcattgtcatccttgcccaactctatagcccgaatttttcctcaatggaaaaaaaaaaacacatttgagttccttttctcacttgggactcttgttgtggatgtggagagaaaggtgtgttttgaacatgtgcttgaggaatggggatttgaagttgttatcactgatgaaaatgcctatcttgatccactatctatctttgctatcaatgaaaattttaatgaggatagagtggacgatggttatttggaaagaatccgtcttcccttctggaatctgaatgactatgacttgaaaagaaagagggtaaatgcgtataacattctctcttatcgatttgaagaggagcgaaaaattgaatcagcgcaaaaaggtccaaataagatgctccagattgagtggtacgggattaaagaatttaaagttgacccttttatcagcaactccataactgaatttactcttttagaagcattgctgggaaagaggatagatccaaaaaaatactcatattcaaagcaagcctgcactctttccaactatctcacatttttgtgtgctgagggtttggatggattcaatttggaagagcaccttgaacgaaggttgaaagcggccggtcatgacgtttcagatgacgaggaggaagaattgacttcagctgaacaagcggggcctatcaagatattggctgatccacttggttttatgaaagagtgtttggaggagatcccaatcgaaactgaaccatcactggaagaaagagggcagttttccactgattatcattctgagaaatttgaaatcaattacaatgacatttttaatcctcacaattgcatgaacactcacggcgatgaaattcccacaccgtcagatggcaattgttttttttcagcatttactgaaacttttgaagttgaaagacctgacaccttgaggtctgatttctcagactggcttatggaatttaatggggggtcctatgcttcacttgcagaaatgatcagaccgaatggagtttttatggaggcagaactcatatacttgttttgtgtatttagaggagtcacgttgattattcatgatagaactcatgaaaaagagaatgtttatgctgtacaccgcgggtttgaggagggccatatggtacatagaggcaatcattttgtcgggattgaaacttacaatattagtactttaacctcagaccccttacttggtgacatcccatgcggtttttcagaggaaattacaaaattccattttcggcctgatcatttcaactgtgcccagttcagaggaaggaaggcggcttttatcaccaaagttgatgcagattacgggcacaacggtatggtttacccccacaattcatgggtaccttctttagaagagatcattcagatctgtggtcagggagatgatttcaattgtgcattaataaatttctatgaggcaaactcatctcttgggttccatagggataatgaacgggtgtacaatgatgatcctattttgaccgtctgcacattcggtgaaggtagattcaccattgaatttaaggatcaggtaacttcttttctaatgactgctggctctttctttttaatgcctaaagggttccagaagaaggcaagacactctgtctcaaatgaaatgtcgagagtctcgattactttcaggaagcatgttagaaggttgaatgggtcaccgattgccatcagggaagaaaattacaaaaatacatgcctcattaatgccttttcaaaagcaatgaaaaggagcaaacaggcaatcattgcaaaactgaagactgttaatagccctttctggagtagatacctatctgagggtaacggtggctccattgaagattgtcaatcggcctgtgaggcactggatgttactgtcgaccttaatgtaaatggaaaatgtgtggttcttggaaaaggggctttaagaatctcaatggctttaagaaacaaccatttttcagttatcaatgctgcacaactgatggagaggacttttgttagccacttgcttgaaaaaggaaatgtcaatgtgttagaaggatttgacgcaatgctaagtggtgatgtgggcgcagcaggtgttaacaaaattcaatttgcagccaattttgaatttgctagaattttggcaaattcatttctaaatatgacaactggcatctgcctgggcaaggcattggataatggggaaaagtattttctccacattttgaaagatagagtgaaacagattggtatagacgtcacaatggtgtgcggatttgctggatcggggaaaagtcgcaaactgcagtcctggctgcattcaaggaaaaaagggaacttctgtgtggtttccccaagaacaaacttagccgctgactgggcattcaagttagaattagagcccaatgaacagagaaaggtttcaacatttgaaaaattcatcaaaactgataaaagcaaattagatctcatagttattgatgaattgacattgtttccaaatggttacctggatctcctcgtgtatgaattggctgatgtcaataggcattgtcaaatcatccttctgtttgatccattgcaagcaagataccacaacaaaatggatgaatcaatcctgacatttgaacatgacgtggacaggcttattggtggacagaacattgagtacatttacagcacgcatcggatgtccagatacttcaatagattttttgatgtaccttgcttcaatcaggctgatagaacagaggaacaaaggttgtggatatttgatgacgtttactccataccatccatttgctccgaccgtcaggaaccatgtgatgttcttttggttgaatctgaccttgaaaagaaggcattttcacccatcataaatgttatgacatttggtgaatcccagggactcacatttaatcatgtttgtattttgctgtcagagtccagtgcagcttcaaacgaatttagatggatggtggcgctgacgagagcaaggaccaggttttcactctgttcaaccttcttaggtggaattgaagaatttaaagtcaaaaggaaggaaagtctcatcacatccatactccaaggcgagaagatcacattcaacagattaaatctgatgctgaaatgcaatttaattaggagagaaaaagaaaatgggtgcagagatgaggtcgatagggaggaaaggttggagggtgaccctttcctcaaaccatttatcttcttgggacaaagagttgagaaggatgaagatgaggtagaagaagtgaagatcagggaaccaacctgtcaaactcatctgtatataacagagcctaattttggtttgtgctacaatttcgacttcattagggaaaaagaacagcgggaatacagagaggatatgcttgtaactaaccaattctgtgacagttatgataaggttcatataaacggcaaaagagaaacccctggtcccctgcgattcaaagcgatttatccaaagcactcagccgatgatgacatgacgttctggatggccgtcagaaaaaggcttgtatttagagaagaggaggagaattatcaaaggttgtcaagggcgcatttagttgggggtttgctatacaccaacttcaaaaaaaaaatgggcctggaatttacgtttgaccaaggtctactggaggaaagcataaatgcatttgaaaagaaaaagctggaaaaatcatgtggcacaattaaatctcatagcataaggtcggacattgattgggcgctgaatgatgtatttcttttcatgaaaagccagttatgcaccaagtacgaaaaacaatttgttgatgctaaagcgggtcaaactcttgcctgttttcagcacctgattttggtacagttcgctccatggtgtagatacctagaaacccagatcagaaatcagttgcctgaagaaatttacattcactcaaataaaaattttgatgatttgaatgcatgggtcaaaaaatttttccagagggatatctgtgttgagtctgattatgaagcatttgatgcaagccaggatgaatacatattatccttcgagattcatctgatgaaagatgcgcattttccgcagaaaatcattgatgcatacatagaccttaaatgcaaattgggatgcaaattgggccatttttcaataatgagatttacaggggaattttgcaccttcctattcaacacactggccaatatggcattcactatgtgtagatacgaatggaggagaggacaaccaattgcattcgcaggagatgatatgtgtgcattaaacaatttggctgtttgtcatgatttcgatgacctttttgaactcatcagcctaaaagctaaggtggaaaggacagaaaccccaatgttttgtggatggagactaactccatatgggattgtgaaggagcctgaattagtctataatcgctttcaagtggccattgaagagggaaaggtcttggagtgtctggaaaattatgcaatcgaggtttcttatgcctacagtttaagtgagaggctgtatgaagttttgaaaagtgaaaggcaagttcagtatcatcaagctgtggttagatttatagtcacgcacattgacaaactcaaaacaaaagtgagggaccttttcttagaacaatcttccgacgaagatatctgatggcatccctgatcaatgtaagttcacttgtaaatagggtgaagttggatcaaagtataataggtagtgatgaaataaacaaactgtatggttccgatgcaccattggtgttcaaagatgaagttaaaatggttattcctgggaatgctgagggtgaggcaatcaaattgcaagcaaatattctgaccgctgacagattgcagtcaataagaaatgcaaaagtcaatggcaaagaagcggcttatctgcatttgggatttgttccaattgcaattagatctctattaccttctggaaatgaacagatctggggtagatgcgcactggtagatactagcagaactcgagccgaaacagctgttattgatgaatttgaattcaagttcacaaagaaacagccatttgctgcaaaactactaaccatcaacgctgcagtggatattaattgcaaagtgagtgtcggtagcattcaggtgctgctggagctccatggtgttgatctgagggaagaacgttctgtagcagcaatcatcactggcttaacatgcactcccaccaacaaaatggtgttgctgcataagatagagtgcgacacgcccaaatggtctttgtgcaatataatagagcaggttgaggatgaggaagaatccaagaaggcatttgaaaacatgtttaatgcatcttcttccaacttgatcgacttgggtcaagaacagtggctcgacgaaggtaagcgaacacctttgattggcagcttggcaattaaagggtttggacgcaaagtgatgcctgttcgcagacgaaacctcaccacgagaaatctcatgaaggattatgtgtctcatgttaagtcagagacggcttcactgaaaagaagtcaaagtggaagagattggggtaatgatagattgagaaaatatctagaagagcaggctctggagcaggccagatcatcgactgatcatcagttggttaaagcaccaaaatttaaaaccatcgaagtgactggtttggaaactgtgcatgatctaaaagataaaattgacaaggcagagtcttcaactgccagtgacactggaaccaagtgagtataacgtgtgactagtgtaaatagttagtacttatttgaattaatatagatagtgtacatccatgaaaatcaccaatgataatgccgcaactatcaactattggttagccatagttgaaccattcctcacatctgatgaggacagaaattctgatgacatcattcgaaaattcagagctgtagtggccgagcatggagacacagaggaggtggaccctgaggtcttcttcgccattttttccatcttggccacaaagtacggcagagtttattcaaaaaaagttgaagaattgaatgagtcactcaaagctgcaattttggctggggcagaagcagaagatctgagaaacaagttgaaagacatttcccaaagatatgcatcacagcttgagatcacagcagatagagagcagcagcttgaaagtttgaaaaaaaaagggcatgagcaaccactgaccggcagtggatcttctgaaccggtacatgctgaatcagcacacgctccacagttgcatgtggtgaatgatctgcaacaattctacataccattcaatgaatacccaagtctaactcagtcaataggtacttctgacattgcaaatgatgagcacctcaaaagagtgcaacttacgcttaagattacagacacgaaggtcttttcaagaactggatttgaatttgcgataagttgtggatcaagaagtacgtcagacaaggacccatatgatggtataatcaagatcagcggaaaaagtcatatgaggaaagatatagcatatgcaataagaacttcgggaatcactgtgaggcaattctgtgcagcctttgcgaatctatattggaatttcaatttggccagaaatactcctcctgaaaactggaggaagaaggggttcacagagggaacaaagtttgcagcttttgactttttctatgcagtaggtagcaatgcagcaattccaactgaagctgatgggagcgttagactgataaggcctccaacaaatgaagaaaatgaggctaactctgctatgaggtatgctgacatatacgagcaaaattcaaaaacagctggacatgtaacttcaagtccactgtacaatcgtgggagcagttatgagagcaaaaacaaagcaaaactcttagaaatgtagtcccgaattctggcatgggcggatgggtgggccaggactttacactcttaaagtataagtaaggggtaactcagccgcacgggtgaagattgtgcggagcctcatgaatctgaatccaagatgctaaaggggataccgcgatctgaggggtcatgggggttagcctgaagaacagaacactcattaagtatgtggtgacgcaggtcccgacaacccaaaaaggtgagctgaacctgatccaattggagcagtacaggtaaagttatatcctttctataaattgaaaggtagtttggacagatacatgtcattcaattggtgtggaacgttagtccaaatgaaacatttatgcttggatggaaagtcaagcaaacgttgtcaatgtgtacgtgaaattgtcaaataaacctcagcaatttctatgccctctttgtgctgagtattgtagagggtgaaggtgtgttttccattttatacgtcaataaaataaaatatgtattacttaaatacacatagggatgtcttttaagaacttttagac

SEQ ID NO: 489 - DNA, 6812 bp, Apple latent spherical virus
  source 1..6812: mol_type = other DNA
tccgttttagagcttgtgagttgttattacgttttgttgtttgaatctctgttttgttactctgatttccttcacgtttgcaccttacactctctaccgataaacattatcatcttttattttgaattttatttgaaaaatttttatattttcaatgtcaatcactactcctgtagtgattcgctttgggagttttgactcccctgctgcggcacagattgccgatactaaggaggaggaaactcctctctctcgccttgcagctttaaatcgcaaggctcaaattgctgctcgttcaagagtagcagctgctgcggcacagtatgccgaagagcaggagacactagttctcactgctcaatccatgagggatgctctccctttatggatgaggggtcttgttgcccccgctcccaaatccaaacgcgctctcaacgcgaggcgcgccgtaaggcgtgggaagcctctgaggaggctgcctgggttcgtgactacggtcgtgaacccacttcccctctctctgtttgggagggcactcctgagctccttgctatggagcatgcttaccttgccaagcaaggtgataagcgcatctgcgctcatttgcgcagacaggctctgcgggctgcctacaaagcccgatgtcaaaagagggcctttaaggtcttccaggaagaatgtgaattcttccgtctccctgtccacattgtggacaaaatccaaatcccagggcaggctagccccgtgccagagagcgtatctctgggtggcggtgttaaaaccgctacttctaagcgccaagtgaaaactcggcgctctttctcttctttcctcccaaaggaggaattttcctttgtgttgggcccttgcccaacatcttcccctgaggttactccaacctcaaccccttcaaccacccccccttcttctccacgggcatcttcgcccagaacccccttgcctcaggttaaagaggtgaccacacagggtattactctgtgttctcatgggcctgcttgtcaggaacatttttgttttggttttctagatctcaaagatgagtttcatgcttccacttatttaaagtggatgcttggaacccaactacctgggtctattttttgttttgacctccaagtttctagttatctagagcactgtacagatacaatggaggctattgatctgtggtggcatgttatggatcgttatgtgcgtaattacagagctaccaaatatgtcactaaagacaattacttaacaaaggctagcattgctattgatactgctcctaaagagtttatcaataagtgtaaattgttgaccaagcgtgcgaagcatcgaaatttgtcaaagaaagaatcttatcttcttaaaagaaatgaaagagattctaaatattgggatgcttttatagccttacgtactaatactaaagaaggtcaaggacctatagattgggtgaaggctggttatcgtaaatgtaaagaatactatgataacaccttctccaaatttgtaaatcaaattatgcaatcccttaatcctctaactatgatcctaggaccgtttaagtctgctttttgggaatgcgtttcaaatctcaaagataaatgtgttggtatgataaacgatcattggcttgcttttgcagcaggttcaacacttgttttgaccctcatatttctttttgcgatgatttgcatttgtaaagtttttgtatatttactatctactctaggtatagttgggtgtacagttacttttcttgtaacttctttaatagttattttctttttatttaatggttttctcgaacaagctgcagatattcaactttgtgagcttgttggagctgattttttaaattttttgaaccaaaatcaaaacatcgctcctattgctgccacaatggctgatattaaagaggaagctctcagagggcaagggttgcaatggtgttttacagctttgtataaattaatttctagattaattcctggtggagctaaggaagctgccatcatgtttaatagcgtaggtaatatcagtcgaagcgcaagtcatgccaaggatttctttgtaaatatgaaggaaatgactacttcttggattgacgccctctctgatgccctggctcttctaggagatgactctgtgactgctatgcacacattaaagcatctctgtgagaatgatttcttggaatgggctaagagagttgagcgctatgcaggtgatacatatgattctatgattttgaatcctgcagatcgacttaggataattagggaattagttgaccaacaagtgggctttcaaaaagccttctttaaccccagaatagcttcaaaggcacctagattgatgctcactgaatttcagcgcttatcaactatgttgagagattgccacagtgcactttctcgagctgccctctttgatatgcaaagagttcctcccttttggatacatttgtattcagagaatggcggcacaggaaagtccatggcaatgatgcctttgggtaattatttgttagattctattgaggaacctaagacccatagattcgttactaggaatgtagcctctcgatttttgaatggctaccttcaccaaccttgtttcctcatggacgagtttggtgcagctcctaagacggactatatggacgaagtcactatgttggatctcgtttctcctaaccctttaacgttgaacatggcagctcttggtgacaagaatatcatgttcacttcaaaattaattatttcaactgctaatcgtaggctagctcaccctgatgtaaaacttggggctaatttagatggctttctcagaagacgccacattttggctgaggtggtgttggctcaagggaagccatattttcatgaatttattcttttgaaagcgcgaactgagcagaaaatttatttggatcaagcattgcgagaagttgcaagccccatccatttaagtcctgctgaattttatgcagtttgcgctgagcaatttgtaaattttttaaatcaacaagggaatgctctcattgaacagcagggagtttcctatgttagatctgacgatttttcttttctcaaggattatttgcagtataagatgggtcttgattttcaacaatgtgaaatagagagaatagttactgattattctctctctattaaaaatcaaactatctttccagctgagcatgaacatattttctccagatggagggctgaattagaagcattatccttgtctgaactaattaccatgctcgataagcatgttaccgaaacttttgtatatactctaattaaagagaatcactcaaatgtggttatgtctaacctaacaccttacgagtgcttaatttattctttttgtaaagataagtataagaaagaaactgatgcaaccttctcttctcttcctgaagaggaagttaagcagccttggcttgcagaatttctttcatttacggcaaggctatgtctcaatgtgcccaaatgggtcacattggtcctagccttgtgtgctttttgccttgtaggttatgtactaattaaatttgctataggtttgtttacaggtgcttgtacaatttttagtgttttagctttttcctctttgtctgctcagggtcctgaggattctcctggattcgaaaacgctaggaaaactgctggggttaaggtgcatttcgttaaaacatccttccaaccttctgactggaaggggattaacgttaagccctctggatttaattggggggacgttgctgatgacgatgatgctatccctttgtggggtcaagggcctgatcagaatcaaaacgttctcaatcttttgaaacaccaagttgttttaatagcagagcattccaaggttgtatataatgctatagcccttggaaatagaaattttttgtttactaaacacgtttgggatctcatgccaacctgtaattatggtttattcgggtatgcgattgctaaaaataaaatatacattaatcctaatgttagaccagccattcaattaaaaaatagagatttggttgttgtacagttgcctgattctgttcctcccttctcagccttacctaaggatatttttctaagtaacttagctgaagcacctaaggttgctaacgctgctcttgttgtatcagagccattgtacgagaaacgttcagtggctcaactacaacaaaagatttacccttttgagaacctaccccaaattcatagtagagacacttactcttgtgggtctttgggctcaaagcctatgcctgcctgttattcttatacttttgatacttttgcgggcttatgcacttcacctcttatttctatggatggcggcaggtgcgttttactaggtttacatgtagctggagataaaagtaagatggggtatgcacagatagttaccctggaagacttctccgatattaacttttctgagaaggttggacaaggacccgagcaaatgtatataccaactgctcgatctgaatcctttggatcagtctgtcttcttgggaaatggactggccctaagccttattttttagagaatagttctttaactccctctctaattcatgactgtatagatatagacatgacaacggagcctgctattctttctaagaaagatcccagacttcaatacactaacaataaagattttgatccttttctctcaggtatgggaaagtatgctgttgaggctcactcctttgatgaagatgaagaattgtttgaggatgctctagatcgagttttctcagagatacctatgtttacctgtgaagatttatctaatgatcaggtatgcaatggtatagaggacgatgattatgctgaaggattggttatgcagactgctgaaggttaccccttctgcactatgcggcccccaggagtcacaggaaagacgtggctttttgcgggatcaccaggtgattggcacatagtccccaattctcttcttgctaacgaacttaatgtcaaagagttgaaccttagcaagaatatttttgaaccagtgataggtatagattttcccaaggatgagaaagttgattcttctaaagtgtacataaaacaaaaaactcgactttttactatcctacctgttgattataatattttagttaggaaatattttctttcttttgtttcacaacttatggccctccataatgaagttcctacaaaggtaggtattgatccaatttctaatgaatggtctattctttgtcattctcttcactcaaaaggaaccaattggttcaacggagattattccagatttgatggaataacacctcgtaatgtgcttcagggcattgtgaagagaatttcgcgtagatatgctaacaagagttcttttgctataacagatcctacactttctatcaatggtgatcttgctagatcccttttgatggatatgtgtagcactcgatatgggctaactaatggggacctttggtatgtcacttctggtataccttcaggatttcccttaaccgttatagttaattctttagttaattctttctttgtgcactttgcttatatgaagcttcattcttctgaagtgcacaaggctttgtatcctctttattcttttagaacccttgtatcatatgctgtttatggggatgataatctaatttctgtacatgacacaattaaagatacttttaatttagttactatatctaacttattgttggagcatggtgtgactcttaagaatggagccgataaaaatgaggaaattttatctccattctatcctatagagaaggtggattttctcaagagacgattcaccactttacaaggacatattgttgctccacttaacactgttaatataactgagcgcttgcactgggttcgtaagggcctaggtgatgctgatgccacacttgagaactgtaaatcagctctctttgaagctttatttcatggagagctgtattacaatgatcttcgaggcaaaattgaaaaagcttgtaaagtgaagggccttcctttgatagtcccagattaccaagacgctctttctttatttttaactggaggctcatatgctaaggctattcaggctatagcgatgaatctccctgatagaatctctctgtacaaatctgaattctatagtgtacaaatatatcctcaaattttttatgtgaccaatgagagaaatgtcacacttcagaaattgctggagaccactactctccgtaacatttgttatgtttctaggaactacgagtctaggagcagttctaggggtcttttcactcttaagggtgaaggttggactccagctgctttgaaagctcgtcttagtgtgtacaaagctatggccaaacctgtttacttcgtagatgaggctaatgatggtttggctatgttttattgcttagattatgcttttcgtgtttgtggtttaacccggagtcaaattgcaaaaattcttaatgcagtttttggtggtaaccccgaagtctgccaaagaattttccaatttttctctcaagtcgagccaaccaataagtacattcctcccaatcaaaggaggtaatttgtttggtctttcttccttcttttctttctttctttcttttgaactagtttgttctcgtgatccttggatccgttaaggtttcttgctggttcttccttaagatgagaacatgaaccagtctagttctttttgtttgctgtttattttatttcagtgtgtttgaaaagagtcggatagtccaatcc

SEQ ID NO: 490 - DNA, 8170 bp, Soybean latent spherical virus
  source 1..8170: mol_type = other DNA
tttaatatttgcaatgtctttccattgtccaagttctacttgccttggttacactcaatctttctctcgccgtgatatgcgagagcaaggggatcgttgtccccatgctatgtgtggtgctcttctagtgaagaaggtgcccactttatccccacagggtgccagacctgtggtatcaaagaccactgttgtggtccctcctcaagccactgaggaggttttgtattatgggtgtgcccccagacccgcttttcttgaagcggttttggcggccccaaaattaaagatggctccaccagtggtggatgcgatggaagtcgcatacctccgtggtgttgcagccatggaagctgaggagaagaaactcctcaggaaagaaaaggctgcagttgtggcccgtgctaaggcacggcgagctgcaaggaaggcagccaagaagcaagttgccgagatgaaggcaactgtggccctgaaattggccacaaggcaaaaaactgcacgtttgagtgcagctaagagggccatgaaggccaaaagaaaggcagccaaggaggctgccaggttggcgcttgaagagcgccgtgctgcgggtttaacccgcaaatcggccttcaggcgtagcctgaaaaagaaagccactaagatggctggtaggaaggtccctaagacctccacttccacctttcccaaggtggaatctttttcttgttttccttcttctcccctccctgcttttattagggaggaacagccctgggtggctgtgaataccccctgccctcatcctgagggcttcgatttggcggttgatcccgcctttgtggctcctattgtggggccaatcgttagtgtgccatttatggcacctgttgtgaaggcttttaatagccttgtagaaattttggcggctatcaattatgaggccgctgtagatttaagagcctacattttagaaatagcttcttacgaaaatttctttgctttacggagaatttttgttggaaaagctttatcttggatggctcttatcctacctctttatccctatgcgggcatctttgatacttatctcccacttgatatggtggaagataagaattgtgatgcttatttagcctcattacagcagactgcagtgatggtgctggaagtgacccagggaccaatggacgcacattctatctttgatatagtgcgttccgttggttctaaggttgctagcataaaggacaaggtagtgggatgtatagttgagaaatctgctgccctgttggacactgttatagacacagcaaagggcatgttttttggagttcttggcccataccttgcccgcgcacagaagatcggagaggaaattaaaaaattctgggataactgtgtcgagtgggcaacaaaattgtggcaaggagctcatatagcattacaagctcttggcatttatgctgtttgggctatagttgctatggtgcttgtaggagtaatgtatatattagaaacaattttgatttgtttaggtgtaatgagtggtcatggtgtccttgttgttgctttgacaggggcagtcatgacttttttaggttttactgtttttcagatggggcgtgagtatatacattttttgaccgccctacgtcaaatcattttcttagcagttattccccaaggaggattgactcaagttaatatcatggattcgtccgttgatgttactgagccacactccttgttagatactgctatggcaccagttcattttttggaaactgttgccagtggtttaacattcttttcttctacctctgttacagtcttaggtaaattaggaaattctctggagggaattcgcaaaggttttaattgcctacgcgattttacttccgttttgttagaacaatttggaaatgcttttgaatacatttccggtaagagaacgtctttcttccgtgatcttgcgtgtgcagttaaagtagatatcgctcgatggacccaggatgcacgggaaaccattgagtattttgaaatttcaggttcccttgataggtatgagtattatcgtgctcgtgagcttatctatcaaggtcaagatttgatcgacaccgccaacaaagctcgtagttcgcacacaagtgtaaaattcttgcgaactattggcaagttggttgaggaactaaaagaaattcgtgctaagtgtgcacgaagtttaaaattcccaggatggcgtcgacagcctttttgggtatattgttttggtgagagtcaatgtggcaaatctactttggcaaattatttgatgccattgttgatgtctcacatgggttgggatcctcaggatgtttacagcaaggatcccgttgatggttactggtccggatattatcagcagaagggtttaaagataaatgatttatctgctgttaattccaaagatgtagcgcccctcgagcagcagttgataccattgatatccactgaggagaaaatggtgtcttcggctgaaattgaaggaaaaggaatgcagtttgcctctgaaattgtagtttcttcatccaattttaatgatgcaccaactggtgctgaaattttggatgcagatgcttacagacagagacgaaaggttttgatgcgctgcagaagggctgctgagtgggttcataatgctgatggtacgcgcacagagaagcttgatgctgagggcaaaattgtatataagccctatgatccatccaatgctttatcttgtaccgaggtgcaatggattcatcctgtttcatttacagctcttcccggaccctgtgggcagtggcacttagccgagttcaccatacctatggtgaaggaggctatggatgcccactttttgcaagaagaaacaaagatggcatcctggaagtcgagccttggcatgaagagtcaaacagcaaggaaaatgggttcatacttgcaggatatgattaagggtattggtaattttgttacccttaaaggagcaaaagattcagatcctcgttatttgctggtagctgttgatggaaaatgctatgcgttagaccagcaagggaaagccactccttatgaggattgtgatgttgttgaagaaattgagcggctaactttgttgcaataccgctcttatttcgcggacttggtaatggaacatgctgacaatacatattatcaagattcattccattcatcaacagtccgagattttttgttggctctaatgaaagatgggtcaactgttttgtctgtggatagtctgggtagtagtactcaggacattcacaaagaattatgggcagaattgggactttcagaaaagatttttctgagggtttcacaaatagctcgtaatcaattgcgcgatgctccacattttaaggaagacgttgcgcacaattttttggaaactatgaggcatcttagggatgctattgtagatagaaaggaacaaattcttttattttttgcagcagtagctttagtgggcttgtttagttggggttttttgagcctaattaaacaatttgcttgtggttctttaggatttggtgctggcatcgcattgcgtgagcaaattgctcatagtagtgttatgtcttcaggtagtgtgactagtgcctttgttgcacgcaacatgccagttgtatggggcaaagctgctaggtatgccactgcacactcaagcaaagaagaagtgggcgccaattttgattattttgaagatgctagtgctcatttgttagctcgtgttgttggctcatctggtcagtctgagacctgccttttatttggtcatcaggctattgcactttgtgcgcaccagttgagattgtttcctgacaatgacagggtgactatccattatttttcaaaggagaggcgccctgtttgtttttcatttacttggcattatattaatgctattgagtggcctgactgtgaagtaattgtatatagagatgcacagctcacgccactccctgtatatagtgatgataattatttgtgtggggagcaaacattgcccacagttttaacgataactgggctctcaattaagaagaagaaattctttgatgattccacgttgtgcccaagcgaaaaaattctggacggtgaaatgcccatcgtccggagctggaaagataccgcttctctgagaacgcaagtccagacaattttgtccgagactcatagaagagatataaataggtattatacttctagttacccatcagggaaacatgatagtggaggtataataactgcagttataaatgggaagcgtaaagtgataggcatgcactgtgcgggggcgcaaaatgggaaaatttatgttagtaccattggtcttttgcccacccgcaacattaatgatgcacactctgctgccgattattttgttccaagtattggcagggaggaaaaaggattttgcaagattggttggattgcagatccttcaaagagaccacatgctgccactaagactgcattggcaccagttcctaaggaattggctttgccattgccagagggagtgtctgtaaagattccttctattttaagtgcagcagatccacgcctgcgtgatgaggtgaatcctgaatttaaggattatgatcctctacgcgtaggtatggataaatttgccaaccccatggatccgcttgatgatgaagttttacagcgggtctgtgaagatatttatgaaacctggtatgactgtttaccaatactagatgatgagaaggtcttcttgcaaaagacctccttggaggtggcgttgaacggtataccgggtgaggcttgctatgaagccatgaggttggatacatctgagggttatccttttgttttagaaaggaaaccaggggagagcggcaaactcagttatgtacatattgatgagaatggcgttcgttcccttattcctggtacatcggtttttagagattaccatgaattgtcagcaagtatactgacccaagtgcctgtgttgaattgcattgaatgtcctaaagatgagttgctaaaaccatctaaagttttggagaaaccaggcacacggcttttcgatgtactcccctttacacataatattcttttgagggagtattttttaaatttttgtgtttttctccaacaaaatagggtgcatttgccctgttctgttggtgttaatccatattctcgcgagtggacctggctttttgataggttggctgcgaagagtgataaagctttgaattgtgattatagtaaatttgatgggcttatatcacatcaagtctacatgcacatggttgcaaccattaaccgactctttagagatggtgaggaagcaaattgtgcgcgtaagaacttgtttttaatgtttacatcacgcaggagcatctgctatgatcaggtttatatggtcaaaggtggaatgccttctggatgcgcactcactgtaattattaattcaattttgaatgaaattttagtgcgctatgtctatagaataaccgtcccaatgccagccaaaaactattttaataaatacgttgaattggtggtatatggtgatgataatttaattgccatacatgatgatgtggtctctttttttgatgggcccattattaaggaaaaattggcagaggttggggtgaccattacggatggtactgataaatcatcacccaccttgttacgcaaaccgctggagtctcttgattttttgaagaggggctttaggaaaattgaagggggaatgtattcttgccctctggataaagggtccctttactcccggttatattacagtgctggaggtaaagggggcctttttcaacttgatatcctccacgataatgttaaatctttcttggaggaactgacgcatcatgctgatcattatgaagagtttcaaagagtgcgcagtttttatattaagcgtattccttcatggtcagctacgctgcctacctatgctacatgtctgaatatgatggaggggcagcggaattcagcaacaccctggcaaccacataaatttatagaaacgcggccttcaggttgcgaaactaaaatgatggcgggccaggataatcatgctcagaagatatgtgtaactgagcgtataattatatgtggtgaaaaatatacgccaccaatactggagacctcttttgttgtttcaatagacaaccccctttatattggtgaaaggggggagtatgttaaaacagagtttggttcaggtatggggcgactgcctactgatgcctggatcaaagctttctccagtcccaagaagcacccacagctttttgaagcttataagatgggtgctactatatattttagatcctgcatgccctatttaaatgcatggtgtgcagtgtgtaagtttgcattggctcatggaatcgatcagagttctattattgctatgtatgagtcatgcaaaccaagaggggcgggcgacattgctcctcttgtggccgtaaaggcatacactaaatttgtgaacagaccagtgtttaaatttaaagagactgttcataaggaagtgctcgaagcacacaatagtgtgcgagtcgcctaaaatgagggcgcttcctttctttactagtttctttgtaaaagtaaactagtccttgggggcaggtagctccctccagcagcttggcacttgattagctttaatagtgttagctacccttcagcaaggtaggagctgcggtcgtattcgaaccgttcccgtggaactactcggggttggaagcaatggcgtatagacgctggtgtcatagttcttaaatcttatatgacactagagaggagagccatccctcttgaagcatgcaataaacaaggttgcaccatgaaactagccagcacattgaaaaatgtggcttaagggcttaataccttcgggcgttttggtggacctaacgttatgcgtgattgctgatggtactaatgtactcatgttttccattacatgataaaaggtggattcccttttcagctatgggttatggaatgatcaactcatgcaccagagtgtactaggttagtgtacaaccctctttttgctacctttttctttgcatgaataaaggagatagttcctgtgaaattcaggttcattatcatttactgctttaatttacttttatccctcatctgagtgagacagatggtacgggttgttaataaaagtgtttgggatgcactgtctgatccctcgctgctggagcgatctgagtccagccgcatttgctgcttttagatataagcagatggaggactagcactccccttgagaacaaaatcgagtgcggcctagtcgtctaggatttccttagctataggtgatcgtgggctaatgcataccacagaaacatgcttcgtctttgagctaagtgtgaccgtgatggacacttgcctgtgttctttagcacagtgtgatttccttttagtaggtgatgatgaatgtagttttgaaactatcaccgaggtctgggaatataagcgttttggcaaacgatattgccttaatctgtgtacgacacaattgatagtgtactcaagagagtagggtctggcagcctgaatcttggatgaggtcccgagatgaaaacgggggggtaattaaccccagctatcggtacacggagatttccacgtttatgtaaatgtggcgcatttgctgtttttagatataaacagatattgcaggtagaaaacctgtgtggatacctattcttggagaaggagttcgctcggaagagtactatcttgaaacatttcaaaaggaaatttcattttaaggagagtaggtaagccattatacacctgtgaggagggtacaagataaagctactgctaaatttaatgctactggaagtgattcccagggctacatgcggtgccattgtacttatacctgaagggtgagtttggaaactcctacctattgaaatggtgagaagtgtttatttagtaagctcctaatcattatagggtgacgttgttttcgcaattttgttggtctttaatccttttcaaaattgcttttgcattttaatttatgtacgactcggggaaaagaaccactgtgtgtgtgtttggattcccaatgggtagactataccaatgttagtccccc

SEQ ID NO: 491 - DNA, 76 bp, Spinach latent virus
  source 1..76: mol_type = other DNA
gtggtattgtgcattattattttaacgcacaacccggattaatcaggttttctgagtatatacccgttagtactca

SEQ ID NO: 492 - DNA, 71 bp, Spinach latent virus
  source 1..71: mol_type = other DNA
gtattgtgcagtattattttacgcacgacccggattaatcatttttgtgagaatatacccgatagctctca

SEQ ID NO: 493 - DNA, 113 bp, Olive latent virus 2
  source 1..113: mol_type = other DNA
gatatttcgcactcctagtgaatcttcctagtatatccgttgaaaaaacgagagtgcaacaacaaaaactacagagttctttttttttaaaaaaaaaaaaaaatcaaagagac

SEQ ID NO: 494 - DNA, 80 bp, Citrus yellow vein clearing virus
  source 1..80: mol_type = other DNA
gaaaagcaaacattatcatacacaccccaaaaattgtgatcatcgtctctgcatcaacagctcagctaagaaccagagaa

SEQ ID NO: 495 - DNA, 74 bp, Potato latent virus
  source 1..74: mol_type = other DNA
tcggataaaccaaaccaacaatatttacacatactcaagttaaacatacactgttcaatcttgcgtacgttatt

SEQ ID NO: 496 - DNA, 35 bp, Apple stem grooving virus
  source 1..35: mol_type = other DNA
aaatttaacaggcttaatttccgcgctttacgtca

SEQ ID NO: 497 - DNA, 73 bp, Citrus leaf blotch virus
  source 1..73: mol_type = other DNA
gaaaagcaacgaaagcaacctacacaacccaaaattaatatattgcaataactgttatcactcaatataagcc

SEQ ID NO: 498 - DNA, 384 bp, Apple latent spherical virus
  source 1..384: mol_type = other DNA
tccgttttagagcttgtgagttgttattacgttttgttgtttgaatctctgttttgttactctgatttccttcacgtttgcaccttacactctctaccgataaacattatcatcttttattttgaattttatttgaaaaatttttatattttcaatgtcaatcactactcctgtagtgattcgctttgggagttttgactcccctgctgcggcacagattgccgatactaaggaggaggaaactcctctctctcgccttgcagctttaaatcgcaaggctcaaattgctgctcgttcaagagtagcagctgctgcggcacagtatgccgaagagcaggagacactagttctcactgctcaatccatgagggatgctctcccttt

SEQ ID NO: 499 - DNA, 13 bp, Soybean latent spherical virus
  source 1..13: mol_type = other DNA
tttaatatttgca

SEQ ID NO: 500 - DNA, 192 bp, Spinach latent virus
  source 1..192: mol_type = other DNA
tgttttatttataaaacctggttaagggtcctccgggatgtgctcagcacctagcctaagccaagtccatatgcccacctatgctgctccgggtggatgcttatacatgctatggatgcctacatttgaaataatgtagatgcctaatactctctctcagggagagagtttagatgcctccaaaggagatgc

SEQ ID NO: 501 - DNA, 194 bp, Spinach latent virus
  source 1..194: mol_type = other DNA
tgtgttcctttcatggaacctagtgaggggccctccggggtgtgctcagcacctagcctaagctaagtccatatgcccacctacgctgctccgggtggatgcttatacatgctatggatgcctacatttgaaataatgtagatgcctaatactctctctcagggagagagtttagatgcctccaaaggagatgc

SEQ ID NO: 502 - DNA, 258 bp, Olive latent virus 2
  source 1..258: mol_type = other DNA
tggtggctcgcctagagcggtgtgctggtttctacctaaggaaccaggagagtggagtgacttggtcatgacaagtcgagtagtactttaactacgagtcgtcgttgagacgccggtccccttccaaggggatcgagagggttttcccggtactttacccgggattcgaattgagctgtctttgacagagctcaaactcctcgctagatactctaacgagtgtcttgaggactctcctatggagagtcagtaaagacc

SEQ ID NO: 503 - DNA, 36 bp, Citrus yellow vein clearing virus
  source 1..36: mol_type = other DNA
aacataaatattcaggctttcagtttccattttctg

SEQ ID NO: 504 - DNA, 76 bp, Potato latent virus
  source 1..76: mol_type = other DNA
ttgagttgtgcataaaacctaattaattttaagtgtgcaactataaaataaataaagttttaaatatttttccttt

SEQ ID NO: 505 - DNA, 142 bp, Apple stem grooving virus
  source 1..142: mol_type = other DNA
gagtcgtgtgaaattccgcaaacttggtcgcggtcttgcaggttgacatgcctgcctttatacttaattaaagggttcccccggttttctgagcatttccgggttagtgtggtttttctagagtctagagtttgtccactct

SEQ ID NO: 506 - DNA, 541 bp, Citrus leaf blotch virus
  source 1..541: mol_type = other DNA
tcccgaattctggcatgggcggatgggtgggccaggactttacactcttaaagtataagtaaggggtaactcagccgcacgggtgaagattgtgcggagcctcatgaatctgaatccaagatgctaaaggggataccgcgatctgaggggtcatgggggttagcctgaagaacagaacactcattaagtatgtggtgacgcaggtcccgacaacccaaaaaggtgagctgaacctgatccaattggagcagtacaggtaaagttatatcctttctataaattgaaaggtagtttggacagatacatgtcattcaattggtgtggaacgttagtccaaatgaaacatttatgcttggatggaaagtcaagcaaacgttgtcaatgtgtacgtgaaattgtcaaataaacctcagcaatttctatgccctctttgtgctgagtattgtagagggtgaaggtgtgttttccattttatacgtcaataaaataaaatatgtattacttaaatacacatagggatgtcttttaagaacttttagac

SEQ ID NO: 507 - DNA, 191 bp, Apple latent spherical virus
  source 1..191: mol_type = other DNA
taatttgtttggtctttcttccttcttttctttctttctttcttttgaactagtttgttctcgtgatccttggatccgttaaggtttcttgctggttcttccttaagatgagaacatgaaccagtctagttctttttgtttgctgtttattttatttcagtgtgtttgaaaagagtcggatagtccaatcc

SEQ ID NO: 508 - DNA, 1569 bp, Soybean latent spherical virus
  source 1..1569: mol_type = other DNA
aatgagggcgcttcctttctttactagtttctttgtaaaagtaaactagtccttgggggcaggtagctccctccagcagcttggcacttgattagctttaatagtgttagctacccttcagcaaggtaggagctgcggtcgtattcgaaccgttcccgtggaactactcggggttggaagcaatggcgtatagacgctggtgtcatagttcttaaatcttatatgacactagagaggagagccatccctcttgaagcatgcaataaacaaggttgcaccatgaaactagccagcacattgaaaaatgtggcttaagggcttaataccttcgggcgttttggtggacctaacgttatgcgtgattgctgatggtactaatgtactcatgttttccattacatgataaaaggtggattcccttttcagctatgggttatggaatgatcaactcatgcaccagagtgtactaggttagtgtacaaccctctttttgctacctttttctttgcatgaataaaggagatagttcctgtgaaattcaggttcattatcatttactgctttaatttacttttatccctcatctgagtgagacagatggtacgggttgttaataaaagtgtttgggatgcactgtctgatccctcgctgctggagcgatctgagtccagccgcatttgctgcttttagatataagcagatggaggactagcactccccttgagaacaaaatcgagtgcggcctagtcgtctaggatttccttagctataggtgatcgtgggctaatgcataccacagaaacatgcttcgtctttgagctaagtgtgaccgtgatggacacttgcctgtgttctttagcacagtgtgatttccttttagtaggtgatgatgaatgtagttttgaaactatcaccgaggtctgggaatataagcgttttggcaaacgatattgccttaatctgtgtacgacacaattgatagtgtactcaagagagtagggtctggcagcctgaatcttggatgaggtcccgagatgaaaacgggggggtaattaaccccagctatcggtacacggagatttccacgtttatgtaaatgtggcgcatttgctgtttttagatataaacagatattgcaggtagaaaacctgtgtggatacctattcttggagaaggagttcgctcggaagagtactatcttgaaacatttcaaaaggaaatttcattttaaggagagtaggtaagccattatacacctgtgaggagggtacaagataaagctactgctaaatttaatgctactggaagtgattcccagggctacatgcggtgccattgtacttatacctgaagggtgagtttggaaactcctacctattgaaatggtgagaagtgtttatttagtaagctcctaatcattatagggtgacgttgttttcgcaattttgttggtctttaatccttttcaaaattgcttttgcattttaatttatgtacgactcggggaaaagaaccactgtgtgtgtgtttggattcccaatgggtagactataccaatgttagtccccc

SEQ ID NO: 509 - protein, 3582 aa, Citrus tristeza virus
MSKLRGSFWSSAIAVNSDYTISRIWRKLNTIVVLHYFGFVRITKVIRDKSADMPIVPLRKSVFPFSVRAAVTSFVLLGVLLTLRIQGASVAFPLSTHLALFVPALFAGFSRFSLCKPPLTSAAKRSLRQAKRESVSLSSRASSRFSREVPRGTRSRLHRRVVRRADTAPVESPQDKPTRRNSRLGKTSHLPYVGEAALDDILRWIEEVNPHPSMVAIPVPITFGTMPATAWCSHSEAAVLRAALTITRLKLISPLRRNTYGTSIMTYLLPLTVPVRFLPASASIFPSKSKLGVEVPSGRDLHTAFVRSSHASAFFSDAVRASFVPSSAEQFFHFRRQRTHVLAITDPVLCGTVSVLMSDGVNTARLDVVAPAYYAYAESLGARVRFLWESSDVDDAKVRDGQCYVRHVFDVALYFGRRADLSVRRALGMYPTVGALKAYLVREYGRDSLKVPMRGTYTFGSVFHCLSLNLQVDLRSIPNHHLVGGTSAHVLIGQVRVSVPGSIVKPSRSAVRRRNRRMRRDGFLGSSGSSSSAGESTRCSDCSSPRGLPSPSVLKPSLGRIPSIDRRFRFPAGTQLRVSVPRRVDDHVYVSTGSNFDELCHAVLTRMSKGTTLEILLHSIRERKGLLGFAACFRWGSSHVFVKRGNFTARFPISAVRYENQYAAVMMDVGTSWVPKGYVPDVDVVKRRRSRNRRFPLSHRAVDQSVPALQSSPVEVASVSSDKPSSSQKASSPSTSSSSSFNSTRSSDWVNVGFSHRTTNKVREPRYAGHRRIGNFTFPRGTVYNTPVDERAYKRVLRLRDTTACSFLRILLARLSGYRPLSDEFFNKCVTSRFVACIEPVESGLVKVHFRSDVFRASFPFDGQPIHPATALTLEVVVSWDWMVTAFQNPLKDGYCYIRHFAEVSLSMGRIFFRRDVDLGPFPYVFEVQHRLERLYGKAALRYGVRGQYSAPRCFHCCYNDSPRPMASFNGYHKMGGEDNSLIITDTDRLRAVGSAYEKVKRNIPDSLLVRSVEKDLIEFNQTLVDMHRSRPGVVVPFQMSENQQVMLTRAYPEFNINFIHSVHSDHPVAAGSRALENHLVRKHAGTDYSDVGGCPLFHLRAGHSGVHVCRPVYDVKDAHRRVVRHHQLSKVSLDQSDGVKQVGWTVNTNSVCGNILGECYHASEAMVMVQVYDVPLRELCRAMINKKTSVCYMTMVTPGELLDARESFFIKDLDCSVELDPIADRVVYCFNNSAYTHTYSTICECMRTPCLVVDGFLFTIEMVSLRCSVNYYCITKSSVCPRISETKRLRYRRCDSDLIRIKIPRYSSKTRSCLPGCYYLYLDAKFVSRVYEYVVNNCVVVNAKTFEWTWNYIKSCKSRVVISGKIIHRDEPIALEYLDGFSAVMLSAGVKGRQNADVSRRLAAFSGETSIFELVGFAISEKCRDLFLGIQDAVERCVKSYLRNSFNMSFVDLSDPLLTISEYSELDVPIDLPGFGGIVDGNETRLMEDGVKSALLRKAVQAEAQLSLKRGNTSEIVPCDDDDDSNGDDSRVSLDTDWWFVLRGGSSGGLRAGAAPSLFRCLLRKLGGGLCLAKKVLELLVKRVVESFSRLKRKTARLTSFANLLLARLSCGFFDDTVFSAVWEIAINLTRIVDGVVKTKLGCFRNLFRLIPKLYAGCKDVVKDVSNAYRSVVSFSAEVLGKSYSKLCQFCLEIFDIGLIEVSARNLGLETCVSIALAIFDVLITFPLGSVSFPVVCARVFGRLAMEVGSNFLFKKVFGKPETLGEDTFRRTVSMVLRPKAFDKLSVDAKGLVRCSGVIPGVLRIILSSLFSEDDAWVGYSKHEVSSLPIVTFCVKRLSYSLERCKEACVAFIVDSAKKILKSLTSEFNESIQNSDLTSGAKSLYGHVSSILYTSSGVINKAGSAVATVKAVGSDISGRVKRMRPRFSLSRHFDEQTSEYYSASDCSELDESLFSETPGLRGNARCRDLFRIVSRRAVACCEYVTILLKRLASRAGEYSYSYVMDTLVRLYVATDDVVRRCRSFTFDCTDKASNFVTGFLSWRSLRSGAYSATPGLGGGSRGLTSFSHTGGFTRVIGALGNTLSVVFDEEFFRTLLHRLRADVVVLLVEFLKNLPVCLFSIYTFIECRGRIFPLREFLWGFCRFVWDVIEGLSINTYQYLSAVAEKVYRGAFNRRFNEEDERTLRVITEAEGRIEFLRVVLAEMERFRAASNEVSSSRSSDSPSFPPTYGEIEELNDDSSDSALVIGVDNGTGRTIVDGETDSASGSDSDVSIPLDRDFEQIGRLGGNGNVDVVRLGLKFVLKLLRNLFDARSFKVLYGLLLQTLFYGGSVNKFVCRLVFSLGTCLPFELLRFACSARRLLKSLASFVYQTNLFSEVMVEHLFSVSRLLYDSRYFATVFSELERLNFYLDYFLSLPKRYLFPNSRARSCARVPVPVIRTEGVAPVRERSLNDILDSLDSLKVSDLKGKSTFVDDGESDSGSEHSGSSISFGSVNEEVLNAVNGDSVCEKAPLMKHVTALSRLERHPSGRKDIPVSRKTFVRGESSGVKSKVSMCDYLVTLNSSFGTVPDMYPVARDITYKKLTNAMREFYYSQKITLYELHGKLSSYWDELKVAGFDRKLTRMDLDDDVYVVDFNRKLLVGRNGSHPFRNTLKSYCFMFCNDGLVPCPRSQKYDYALISNQTSFVAANSFLRAVDGKDLTFTNEEHSLIVYEAPPGGGKTHSLVNSYADYCVKVSCLVVTANKNSQTEISQRISNELMGRKLAAKYVTDAASRVFTVDSYLMNHLRLTTQLLFIDECFMVHAGAIGAVVEFTSCKAVVFFGDSKQIHYIHRNDLGVSFVADIDAFIQPEHRIYGEVSYRCPWDICEWLSEFYPRHVATANVGSIGKSSVSIEEINGCDDVPYDKAAKYIVYTQAEKNDLQKHLGRLTVGRNKVVPIVNTVHEVQGETYKRVRLVRFKYQEDTPFSSKNHIVVALTRHVDSLVYSVLTSRRYDDTATNIDRAKEIFDKFRSSNHSYGSSSLEWYLEKYPTEYKGSKASSAPISCINEFLNEVVVGSSVVQLGDVSEELSSRPFESGCDNVTVETPPLLTRVTYTNRLAFGVVRSQAIPPRKASLQENLLSYESRNYNFIKTERFVGPSEFGRAMAAAVIERCFKMEEMAKIRCDIISLTEANILKWLDKRTPCQIKAVHGELKLPFSVEEQISNFKLMVKRDAKVKLDDSSLSKHPAAQNIMFHKKFINAIFSPCFDEFKNRVLSSLNDNIVFFTEMTNAGLAEIIRRIIGDDDNLFVGEVDFSKFDKSQDLFIKEYERTLYSEFGFDTELLDVWMEGEYRARATTLDGQLSFSVDGQRRSGGSNTWIGNSLVTLGILSLYYDVSKFDLLLVSGDDSLIYSSEKISNFSSEICLETGFETKFMSPSVPYFCSKFVVQTGNKTCFVPDPYKLLVKLGAPQNKLTDVELFELFTSFKDMTQDFGDQVVLEKLKLLVEAKYGFASGTTMPALCAIHCVRSNFLSFERLFPFIRGWYVVDALKLRQLRKLTNLICERVVYDNRVSYFSYFDNPFTKPDANDDNVDDLGQAGELATG

SEQ ID NO: 510 - protein, 1056 aa, Spinach latent virus
MDTIVQMKVLCYESMILLMIPSDVNAPRPETAIGRLISDAAVSGVLRQCDFTAAEASQCFVPIITGRSECIETRFSGREIQFRNFSYSSQSFAAAHRVCEADYIYSRFQTRNTTIIDIGGNFCTHSKMGRDNVHSCCPILDVRDGARYTDRFMSVAGALETQPDRELRLNYCSNKFEDCDVSAPWAMAIHSISDIPITSVVKHCFRRGVKKLIASVMMDPMMLVASQGFMPRLNVQWEIEPDEENKGSRRISFHFVDAPGLSYTHNYDVLMQYMTCNQVIISGKAAYRVERVADLSGVFIVEINPGGNCWNERLDLVPMRDVSCAWMTSLKRKTLVRVAIPQYIHSWEVKYVIADTDFVRRVAEVSFRQYKPETPLQDLVKSVATMISSASNHCIINGVTMQTGTPLAIEDYVPMAVTFVAFAKSRYDSIKEGMKMVRQRGTNIADPNDHYDYEKDGSDVKSFSNHIIPMKNTIKSLFFPMKVKMNDNSMLIYSQGILSTVVDEIKTLFGWDVWDTDDAVIQSLPSFYKMEDVFQVTSDHYCLSHTLSVDWWLEGLYDSYHDMRVAHKKKLDEEESRKTKVENALLKIAEVLEKPDVSDGLKALSELPIISSLLEKKSEEIVTKPQCRDTEKPHINPYADAIKEAQAYYEELEVVNTRNLRGVGDYLFWRKKSNYASVWGADESRVVLEPMARKFYSRDRNVSIPEYERGMTVDGFVSIKWVDGNITEDTWKCLSKYAVVLLDSSCVFDAGSRIMPGLKKALVMDANFKIVIEDGVAGCGKTTSLLKQAKPDSDLLLAANRETANDAKASGVIPKALEYRVRTVDSYLMLRTWFTAERLLVDECFLVHAGLVYAAATLARVKEVIAFGDTKQIPFVSRIPTVKLRHASVVGTLKPRTITYRCPRDVTAVLSEKFYGTKVKTFNLVKQSLELKNIDSSTEIPVEKDTLYIAHTQADKHALMRLPGMNGIEVLTTHEAQGKTRDHVILVRLSKTTNLLYSGKMPDAGGSHNLVGLSRHKKSLRYFSVFADDPDDQIATGIRWSKTLDEQELAAYRAAG

SEQ ID NO: 511 - protein, 797 aa, Spinach latent virus
MDSYHFLSQLCDLNVLTHALYVNQVFEIVDQSTTSYMQMWLYSRVIVPVLKYHLSGDIILDKLHDVFLGTFRSMMVPMIMLNRLSFVVKMTTMNHHRKAYLPLEEREKIHAATFLGHDHWASVTSGSSFYDDLEILADETVNDDLHFDKESSMPDEYQIMWNDGTIDSVWSSQFECEEPPKPKFIPRPSDKVCDPVVIQDAVNDIFPFHHEMDDRYFQTLVETQDISLEVSKCWIDASNFRDFVKGPNSYVEPVFQTGATSKRVHTQREALLAVKKRNMNIPELQSTFDLDAEVNTCFKRFLTHVVDLPRLKRLQPMTGVEVEYFNQYLLGKNPPVKEYQGPLTLTALDKYMHMVKTIVKPVEDNSLKHERPLCATITYHKKGIVMQASPRFLSAMSRLVYVLKSKIHIPSGKWHQLFTLDAGKSDAVKWFKEVDFSKFDKSQGELHHKVQEKIFNALKLPPGFVEMWFSAHERSHIVDREAGIGFSVDYQRRTGDANTYLGNTLVTLICLARVYDLCNPNITFVIASGDDSLIGSVEELPRGPGEFIYNPVNFEAKFPHNQPFIWLKVLVSVDLEDGGREVIAVPNPAKLLIGMGRRDCQYQALDDLYQSWLDVIYYFRDARVCEKVADLCAYRQTRRSSMYLLSALLSLPSCFANKKKFKWLCYRLREQGCLKKDIYPVAKPISAHNIRKEDSNGCDVNQGTDDSFSRKKNRGCWEYVPKMLQTDVSVPVTDKSFHSNRGSSVSPTDCGDGGCSRSASSIGSKNTKPRHRFRAAGVHQPSGRDPDRIPPNHRRSA

SEQ ID NO: 512 - protein, 787 aa, Olive latent virus 2
MAGVLYDEEYVPQEPDYLYCPYEWEGEDPTQCDANVPSVSYLVEAVKKSFTEGNHDMLISCESYHAECCEGPLMNKGLTLSTYFMSYPGISLPAFGGGVIHVTSARVCMQAFYAVTPGRCSCSCGTQFIYRAKGGTGLTFDATNTISSAFKFEDGKVKWLTEDLGLALLAGCFLKYVPIPHEIEIKIERKVEPVSALDFWEPEGLISDVHFVHPQERALAPEPPMDVEMVRLVRTELFEHFNPTLLLNARSDFSGEKLKEVELPRAQSEPLVPRVCLPRGDDALIDQFFIDKAPEHFNREPATDQWQVESDDFTVDFPTQVRLRERDEDWFRRKPDFAVSSIRTGLEMPRIATKKEMLMAFSKRNVGAPQMVEVPQEIHVKRLADRFFRTFLKEGGWDKGDGHYWDDFFHRKGRKVFSLENCYDDPLSSYLVMLKSAGKFSLDLNFPVRSVPQTITYHEKWVTEVFSPMFLQVMARFFSRLQDWVVVPAGPMADFSRVWPSFEGKCLTEIDLSKFDKSQGKLLHDVQREIFLRLGFPPIWCDWWFKFHESSYLNDKNLGIAFSVDYQRRTGNTATYFGNTLVTMIMMAEVYELDSLPFCGLFSGDDNLIVTDRPLEGRVSLFPNMFNMEAKVMRPGQNYMCSKYLCTVDGRVTPVPDPFKLLKKAGASCPLEHLDDFYESFLDYTKYLVRDEVRTLIPRLMAHRYQVSMDEAGVALDQIMSWRKSKTQFFKHFQYRKPIKDSLEAVKSDFLSAFGKVDDRIRVWRGRRTNHKKEVDALKVPLVSFRE

SEQ ID NO: 513 - protein, 1649 aa, Citrus yellow vein clearing virus
MATIRGAIERITDTTVRTTLQEEACRQIRAELKNVEHINRYAIQPDAADALEHLGIGSNPFSVALHTHGACKAIENQLLYVVGTLLPKERVTMLFLKKSKLNIMKRCPKFQDIFLNQHIEPRDVSRYCDFNVQSTSTSIPTRTAYISDTLHFMDRRDLVRLFLNSPNLETLYATIVLPVEAAYKQPSRYPEIYQINYDFDGFQYIPGGHGGGAYHHEFEQLQWLDTGHIHWRGPDCKEIRMTITAQMLESLGANHLFCFKRGKLLTPRVRTFGRDTQVLLPKIFRPADKNFNRAIPLTLANKLLLYAKSINTVTFRDVVAKTRQLMKDKELETYTGNDLLHMANYFFAVGALSGVNSYDQLLGLSAWEACTVRIKNTITNLWEKIAGKKEFGKLLEALEWETFTYSRQVTEFTVTGLPALLPLPDISDQEEIFAQQDELDKITAGATKIRTIDIMRGQANRANPKTPINSTPAQGPQLPDTPDPIDQAASKDLVTKLQKNKRIYIQDDGPEYLMGHMAEVPAWYLEQDDTTTRLKNRCAWFFGPPTYRYGHNDIEYTTIEYYPWVERIGAIFGKYNTCLAQTYDAGARIGYHADDEDCYDPDVTVVTINLTGNATFLLKTPTGTRTWKLKPGDFIIMKPGAQRCTKHAIRDCTTNRTSLTFRWQARTCPTNLRKITNLPKATNQPQTTEWRPVTKPRPSTTASSDTQTPLVIDQERGYTTTSDVTPTIRLPAENGNNTGAGPSSALTLADLNDNQAPTTNKGKEKLEEMVETGPTIMERFLNTVQEPTQDLWDSASESAASYLAEGLGISAIQALPWAPHLELINALGFQGTERQYGPDNCLIWPITHYRELPRSNNVEAPPEVLELLDCINRYPTDVPMLKTRAAAFGSDVKNLRIGALVKNQDKQWRASLALLCEENEHLLPTTVIHGAGGSGKSHLLQQWVASTERGNVVTILPTIELLRDWQNKCPHAPKETFKTFEKALIQNSAPVVIMDDYSKLPPGYIEAYVSLKGQCKLLILTGDPRQSHYHEENPEALISTLDPATDYFGKFCAYNINATHRNAKTFANALGVYSEKEIPTTITCSSYQKSGWPTLVPSILKRTALNDMGQRSLTYAGCQGLTTPKVQIVLDNATPLCSDKVMYTALSRAVDQIHFFNTGPNHTDYWEKMNATPFLKTFIDHTREETFAEHQPAEPTVREYAPATHFPPANENLALEPWVEPLTDKHSRELFHSALGHSNCVQTENTVVQLFPHQQAKDETLFWKTIDARIKITTPEENIRACSIATDIGDILFLNYKEAMGLPQDPIPFEQALWDSCQAEVQLTYLSKPLAALANAAQRQDPDFDSNKIQLFLKSQWVKKVEKMGCLRIKPGQTIASFMQQTVMLYGTMARYMRRIRTSLCPPEIMINCETNPNQIGTWVREYWNFNTQSHENDFEAFDQSQDANMLQFELIKAKYHSIPEEIIAGYRHLKCNAHIFLGTISIMRLSGEGPTFDANTECSIAYNHTRYFVPKGTAQLYAGDDSACASPLSEKPSFQHISPELSLKSKAKIRTQQKGDFATFCGWLITPKGLIKNPTQLYASWLLAKHNKDLADVARNYALDLRIAYQLKDELYELLSPEELDHHQLLVREMIKHKMGHLLNLPEGFKTN

SEQ ID NO: 514 - protein, 1780 aa, Potato latent virus
MALTYRSPLEDIVGAFEPSVQTAIANTAANHYKQLEEEKGILFNYALPPEAKQRLIGAGIYLSPFSAVPHSHPVCKILENHLLYVELPSRLDNSFMFVGIKNFKLDLLKRRHANLSMIQTINRYVCSLDKIRYGSNFVVRSSASYPELCRRKGELDGAVLRELVPELMIKSAKNLFLHDELHYWTHRDLITFLEVLKPDKLLGTLVYPPELLKGAKKSLNSWCYTYRVDKDKLFFYPDGVHSEGYEQPLSGGYLLETSRITTRDGEVYCVDVVCSKFAHHLIAITRGDLIVPTQRSFAPFEAITSKGLNNLVRGKVECFPVCASVVSKLYRYLRTLKKPDEQSAMAKLSQLQANPTGEEIHFIQGFAKLVINTNKIDSLINCDSIKVFMGKLFGPLPNWLTKRLRSVQEVSLDEFVHYFEPYVVNVPTKHVNYGFEFNYVMEDFRYEQGENDLVDMLDNFDGSTKMSTSLCMMTPYVGLAPLTTRRKFLCHIEENSIFRVVSRNIFCSYTNSYKVAVSTEGVVRILEIYSKVSVDLLGAYLGKLLKKTEFIERVRSRVKAIAIKHLKYTWQQVGLAWFTSGRRGYTKYIDCSPYTMNTFKELKERWGVIVRELSKQQDNAEAAKNIPEQEIQTTSKPSCVEKRNYFSNTLMTSFAASGVKGKEQVSSEIAKGRGERSELRATKLMGSCSTLGKVAHIASRKGSMGVLECVARVIKLDFQTALKFLRVKGVWMQEYESIGELEEEQIQSPAYDFCAAIAMTFNVEIELTFPGSELVYHFAASSTVSCIRLSIWEGVVTLMRAENDCVITACAQALAREPEDVVKVLKDRLEESILEEIWNGEGVPFERMYLFFEALDIQAHCNRDGAQLVLNGGGKLARCFVIKEDHIEFAGEKKVSRVLELQDARTSSKADPELVKEFQKAGTVVEYVAVQSRAQVLAKSLVDATTGVCSSTIFNDCESLERSFRFTESELARNVCCVIGTFGAGKSTLFKDMMRQCLGKGVHYASPRKVLANELKASLGLAKGKRNRKVGTENWNVHTFESFLKKAKNVAEGELVIIDEIQLYPPGYLDLLLYLIPEFTSVFAVGDPCQSDYDNEKDRHVFLGVETDVCRLLSGREYEFNVLSRRFHNLGFESRLPCRFKFPAGAVKEEYLFVNSMTEANELDSAYKSVYLVSSHLEKKIVEYQSDVKTPNVLTFGESTGCTFKYGCILITQVSSACSERRWITALSRFSHNLCFINATGVPIENVAKSYKDRSLGKFLCGTAVEGDIKSMAYGTPIFKEQFIAGVGRDEGVKEDKVTGDPWLKTMLDLMQLPDVEEAEMMQEEMQEEWFKTHLPQEEIEGVRCRWIHKMLAKEARECRMGSIVSDQFPDDHSKQEGKQITNAAERFEAIYPRHRANDTVTFIMAVKKRLRFSRPSVEKAKLTQAECYGTYLLKNFLDVIKLKPAHDEAMMIRAKEDFEQKKVSKSAATIENHSGRSCRDWCIDIGQIFSKSQICTKWDNRMRVAKAAQTIVCFQHAVLCRFAPYMRYIEMKLKEVLPARFYIHSGKGLDELNSWVKEGRFEGVCTESDYEAFDASQDQYIVAFELALMRYLRLPNDLIEDYKYIKTHLGSKLGNFAIMRFSGEASTFLFNTMANMLFTFMRYELHGDEYICFAGDDMCSSKRLRIKKTHESFLGKLKLKAKVQHTEKPTFCGWNLCADGIYKKPQLVFERMCIAKELNNLHNCIDNYAIEVAFAYKLGELAVNRMDEEELGAFYNCVRLITKFRHLLKSNVVEVFKRK

SEQ ID NO: 515 - protein, 2105 aa, Apple stem grooving virus
MAFTYRNPLEIAINKLPSKQSDQLLSLTTDEIEKTLEVTNRFFSFSITPEDQELLTKHGLTLAPIGFKSHSHPISKMIENHLLYICVPSLLSSFKSVAFFSLRENKVDSFLKMHSVFSHGKIKSLGMYNAIIDGKDKYRYGDVEFSSFRDRVIGLRDQCLTRNKFPKVLFLHDELHFLSPFDMAFLFETIPEIDRVVATTVFPIELLFGDKVSKEPRVYTYKVHGSSFSFYPDGVASECYEQNLANSKWPFTCSGIQWANRKIRVTKLQSLFAHHVFSFDRGRACNEFNHFDKPSCLLAEEMRLLTKRFDKAVINRSTVSSLSTYMACLKTANAASAVAKLRQLEKRDLYPDELNFVYSFGEHFKNFGMRDDFDVSVLQWVKDKFCQVMPHFIAASFFEPTEFHLNMRKLLNDLATKGIEVPLSVIILDKVNFIETRFHARMFDIAQAIGVNLDLLGKRFDYEAESEEYFSENGYIFMPSKSNPERNWILNSGSLKIDYSRLVRARRFRLRRDFLDPISKGKSPRKQLFLESTGNIKSNPNAEKNSESGEIKIEGSAENDQPHEVSHTSMETEDGQGFEGSIPVDLINCFEPEEIKLPKRRRKNDCVFKAISAHLGIDSQDLLNFLVNEDISDELLDCIEEDKGLSHEMIEEVLITKGLSMVYTSDFKEMAVLNRKYGVNGKMYCTIKGNHCELSSKECFIRLLKEGGEAQMSNENLNADSLFDLGRFVHNRDRAVKLAKSMARGTTGLLNEFDLEFCKNMVTLSELFPENFSSVVGLRLGFAGSGKTHKVLQWINYTPSVKRMFISPRRMLADEVEPQLKGTACQVHTWETALKKIDGTFMEVFVDEIGLYPPGYLTLLQMCAFRKIVKGQSENFLKGKLLELSKTCLNIRCFGDPLQLRYYSAEDTNLLDKTHDIDLMIKTIKHKYLFQGYRFGQWFQELVNMPTRVDESKFSRKFFADISSVKTEDYGLILVAKREDKGVFAGRVPVATVSESQGMTISKRVLICLDQNLFAGGANAAIVAITRSKVGFDFILKGNSLKEVQRMAQKTIWQFIIEGKSIPMERIVNMNPGASFYESPLDVGNSSIQDKASNDLFIMPFINLAEEEVDPEEVVGDVIQPVEWFKCHVPVFDTDPTLAEIFDKVAAKEKREFQSVLGLSNQFLDMEKNGCKIDILPFARQNVFPHHQASDDVTFWAGVQKRIRKSNWRREKSKFEEFESQGKELLQEFISMLPFEFKVNIKEIEDGEKSFLEKRKLKSEKMWANHSERSDIDWKLDHAFLFMKSQYCTKEGKMFTEAKAGQTLACFQHIVLFRFGPMLRAIESAFLRSCGDSYYIHSGKNFFCLDSFVTKNASVFDGFSIESDYTAFDSSQDHVILAFEMALLQYLGVSKEFQLDYLRLKLTLGCRLGSLAIMRFTGEFCTFLFNTFANMLFTQLKYKIDPRRHRILFAGDDMCSLSSLKRRRGERATRLMKSFSLTAVEEVRKFPMFCGWYLSPYGIIKSPKLLWARIKMMSERQLLKECVDNYLFEAIFAYRLGERLYTILKEEDFEYHYLVIRFFVRNSKLLTGLSKSLIFEIGEGIGSKWLSSTSTASSRRSNLQTSKLMLSRPQSFTRMQPFSNQTCLIASKGLNQTSRFPLDLVTASSCLISNCLMTPKLIQSGRKATSTNTYTMESSWLGSKQCCQTLEAWKGESLYMMEPAWIRKEATFARIFSSLSLTVATLVSGQSTVCLPQTQIWPKGLDFVWTLIVHNMNRTLSCLLLTLELHTDASTLQGFWKPKLAIQDGLHRQSAAVKHLNSMRKSRWPSWIADPRCFWKKVHQTCTLKRDCSEVTRLEGHAQFPLKGGQTQGCKKREDLGPSRLELKDLEKMSLEDVLQQARRHRVGVYLWKTHIDPAKELLTVPPPEGFKEGESFEGKELYLLLCNHYCKYLFGNIAVFGSSDKTQFPAVGFDTPPVHYNLTTTPKEGETDEGRKARAGSSGEKTKIWRIDLSNVVPELKTFAATSRQNSLNECTFRKLCEPFADLAREFLHERWSKGLATNIYKKWPKAFEKSPWVAFDFATGLKMNRLTPDEKQVIDRMTKRLFRTEGQKGVFEAGSESNLELEG

SEQ ID NO: 516 - protein, 1962 aa, Citrus leaf blotch virus
MALMSNKTAIESILGNFEKKHVDAIYNAAAQTILSHSEFRNKHFAYSLNSYQKKIASKVGIELYPNGYLPHSHPLSKIFENHLLFDVLPGVVNTSRLVMCSIKESKVLVFKGIRDKSRRQVSDLNALNSLNNSHTSFINRLVASKDVSRYTEEADAFFQSKKGSPELFSRNFIKSLENKEAVFFHDEVHHWTKAQMFSFLKSTKVKRFIFTVVYPPEILKKFANSQNPKVYDFKVDKGRLFFFPDGVKTEAYEQKLNMEWLFSASHLRSGDCVWTVTRHKSIYAHHLFEISIGELVTDSKLFFSDYNSIDMSKIFLDRFRSYEVFPISIEHLYKVYSYLLCLKKPDLESGLAKLRQIIGDDVEIKEFLFFEQFCKRLIERQTSWGLFGHSFFEKLTDMALSSLPNSIARIFPQWKKKNTFEFLFSLGTLVVDVERKVCFEHVLEEWGFEVVITDENAYLDPLSIFAINENFNEDRVDDGYLERIRLPFWNLNDYDLKRKRVNAYNILSYRFEEERKIESAQKGPNKMLQIEWYGIKEFKVDPFISNSITEFTLLEALLGKRIDPKKYSYSKQACTLSNYLTFLCAEGLDGFNLEEHLERRLKAAGHDVSDDEEEELTSAEQAGPIKILADPLGFMKECLEEIPIETEPSLEERGQFSTDYHSEKFEINYNDIFNPHNCMNTHGDEIPTPSDGNCFFSAFTETFEVERPDTLRSDFSDWLMEFNGGSYASLAEMIRPNGVFMEAELIYLFCVFRGVTLIIHDRTHEKENVYAVHRGFEEGHMVHRGNHFVGIETYNISTLTSDPLLGDIPCGFSEEITKFHFRPDHFNCAQFRGRKAAFITKVDADYGHNGMVYPHNSWVPSLEEIIQICGQGDDFNCALINFYEANSSLGFHRDNERVYNDDPILTVCTFGEGRFTIEFKDQVTSFLMTAGSFFLMPKGFQKKARHSVSNEMSRVSITFRKHVRRLNGSPIAIREENYKNTCLINAFSKAMKRSKQAIIAKLKTVNSPFWSRYLSEGNGGSIEDCQSACEALDVTVDLNVNGKCVVLGKGALRISMALRNNHFSVINAAQLMERTFVSHLLEKGNVNVLEGFDAMLSGDVGAAGVNKIQFAANFEFARILANSFLNMTTGICLGKALDNGEKYFLHILKDRVKQIGIDVTMVCGFAGSGKSRKLQSWLHSRKKGNFCVVSPRTNLAADWAFKLELEPNEQRKVSTFEKFIKTDKSKLDLIVIDELTLFPNGYLDLLVYELADVNRHCQIILLFDPLQARYHNKMDESILTFEHDVDRLIGGQNIEYIYSTHRMSRYFNRFFDVPCFNQADRTEEQRLWIFDDVYSIPSICSDRQEPCDVLLVESDLEKKAFSPIINVMTFGESQGLTFNHVCILLSESSAASNEFRWMVALTRARTRFSLCSTFLGGIEEFKVKRKESLITSILQGEKITFNRLNLMLKCNLIRREKENGCRDEVDREERLEGDPFLKPFIFLGQRVEKDEDEVEEVKIREPTCQTHLYITEPNFGLCYNFDFIREKEQREYREDMLVTNQFCDSYDKVHINGKRETPGPLRFKAIYPKHSADDDMTFWMAVRKRLVFREEEENYQRLSRAHLVGGLLYTNFKKKMGLEFTFDQGLLEESINAFEKKKLEKSCGTIKSHSIRSDIDWALNDVFLFMKSQLCTKYEKQFVDAKAGQTLACFQHLILVQFAPWCRYLETQIRNQLPEEIYIHSNKNFDDLNAWVKKFFQRDICVESDYEAFDASQDEYILSFEIHLMKDAHFPQKIIDAYIDLKCKLGCKLGHFSIMRFTGEFCTFLFNTLANMAFTMCRYEWRRGQPIAFAGDDMCALNNLAVCHDFDDLFELISLKAKVERTETPMFCGWRLTPYGIVKEPELVYNRFQVAIEEGKVLECLENYAIEVSYAYSLSERLYEVLKSERQVQYHQAVVRFIVTHIDKLKTKVRDLFLEQSSDEDI

SEQ ID NO: 517 - protein, 709 aa, Apple latent spherical virus
GPEQMYIPTARSESFGSVCLLGKWTGPKPYFLENSSLTPSLIHDCIDIDMTTEPAILSKKDPRLQYTNNKDFDPFLSGMGKYAVEAHSFDEDEELFEDALDRVFSEIPMFTCEDLSNDQVCNGIEDDDYAEGLVMQTAEGYPFCTMRPPGVTGKTWLFAGSPGDWHIVPNSLLANELNVKELNLSKNIFEPVIGIDFPKDEKVDSSKVYIKQKTRLFTILPVDYNILVRKYFLSFVSQLMALHNEVPTKVGIDPISNEWSILCHSLHSKGTNWFNGDYSRFDGITPRNVLQGIVKRISRRYANKSSFAITDPTLSINGDLARSLLMDMCSTRYGLTNGDLWYVTSGIPSGFPLTVIVNSLVNSFFVHFAYMKLHSSEVHKALYPLYSFRTLVSYAVYGDDNLISVHDTIKDTFNLVTISNLLLEHGVTLKNGADKNEEILSPFYPIEKVDFLKRRFTTLQGHIVAPLNTVNITERLHWVRKGLGDADATLENCKSALFEALFHGELYYNDLRGKIEKACKVKGLPLIVPDYQDALSLFLTGGSYAKAIQAIAMNLPDRISLYKSEFYSVQIYPQIFYVTNERNVTLQKLLETTTLRNICYVSRNYESRSSSRGLFTLKGEGWTPAALKARLSVYKAMAKPVYFVDEANDGLAMFYCLDYAFRVCGLTRSQIAKILNAVFGGNPEVCQRIFQFFSQVEPTNKYIPPNQRR

SEQ ID NO: 518 - protein, 2195 aa, Soybean latent spherical virus
MSFHCPSSTCLGYTQSFSRRDMREQGDRCPHAMCGALLVKKVPTLSPQGARPVVSKTTVVVPPQATEEVLYYGCAPRPAFLEAVLAAPKLKMAPPVVDAMEVAYLRGVAAMEAEEKKLLRKEKAAVVARAKARRAARKAAKKQVAEMKATVALKLATRQKTARLSAAKRAMKAKRKAAKEAARLALEERRAAGLTRKSAFRRSLKKKATKMAGRKVPKTSTSTFPKVESFSCFPSSPLPAFIREEQPWVAVNTPCPHPEGFDLAVDPAFVAPIVGPIVSVPFMAPVVKAFNSLVEILAAINYEAAVDLRAYILEIASYENFFALRRIFVGKALSWMALILPLYPYAGIFDTYLPLDMVEDKNCDAYLASLQQTAVMVLEVTQGPMDAHSIFDIVRSVGSKVASIKDKVVGCIVEKSAALLDTVIDTAKGMFFGVLGPYLARAQKIGEEIKKFWDNCVEWATKLWQGAHIALQALGIYAVWAIVAMVLVGVMYILETILICLGVMSGHGVLVVALTGAVMTFLGFTVFQMGREYIHFLTALRQIIFLAVIPQGGLTQVNIMDSSVDVTEPHSLLDTAMAPVHFLETVASGLTFFSSTSVTVLGKLGNSLEGIRKGFNCLRDFTSVLLEQFGNAFEYISGKRTSFFRDLACAVKVDIARWTQDARETIEYFEISGSLDRYEYYRARELIYQGQDLIDTANKARSSHTSVKFLRTIGKLVEELKEIRAKCARSLKFPGWRRQPFWVYCFGESQCGKSTLANYLMPLLMSHMGWDPQDVYSKDPVDGYWSGYYQQKGLKINDLSAVNSKDVAPLEQQLIPLISTEEKMVSSAEIEGKGMQFASEIVVSSSNFNDAPTGAEILDADAYRQRRKVLMRCRRAAEWVHNADGTRTEKLDAEGKIVYKPYDPSNALSCTEVQWIHPVSFTALPGPCGQWHLAEFTIPMVKEAMDAHFLQEETKMASWKSSLGMKSQTARKMGSYLQDMIKGIGNFVTLKGAKDSDPRYLLVAVDGKCYALDQQGKATPYEDCDVVEEIERLTLLQYRSYFADLVMEHADNTYYQDSFHSSTVRDFLLALMKDGSTVLSVDSLGSSTQDIHKELWAELGLSEKIFLRVSQIARNQLRDAPHFKEDVAHNFLETMRHLRDAIVDRKEQILLFFAAVALVGLFSWGFLSLIKQFACGSLGFGAGIALREQIAHSSVMSSGSVTSAFVARNMPVVWGKAARYATAHSSKEEVGANFDYFEDASAHLLARVVGSSGQSETCLLFGHQAIALCAHQLRLFPDNDRVTIHYFSKERRPVCFSFTWHYINAIEWPDCEVIVYRDAQLTPLPVYSDDNYLCGEQTLPTVLTITGLSIKKKKFFDDSTLCPSEKILDGEMPIVRSWKDTASLRTQVQTILSETHRRDINRYYTSSYPSGKHDSGGIITAVINGKRKVIGMHCAGAQNGKIYVSTIGLLPTRNINDAHSAADYFVPSIGREEKGFCKIGWIADPSKRPHAATKTALAPVPKELALPLPEGVSVKIPSILSAADPRLRDEVNPEFKDYDPLRVGMDKFANPMDPLDDEVLQRVCEDIYETWYDCLPILDDEKVFLQKTSLEVALNGIPGEACYEAMRLDTSEGYPFVLERKPGESGKLSYVHIDENGVRSLIPGTSVFRDYHELSASILTQVPVLNCIECPKDELLKPSKVLEKPGTRLFDVLPFTHNILLREYFLNFCVFLQQNRVHLPCSVGVNPYSREWTWLFDRLAAKSDKALNCDYSKFDGLISHQVYMHMVATINRLFRDGEEANCARKNLFLMFTSRRSICYDQVYMVKGGMPSGCALTVIINSILNEILVRYVYRITVPMPAKNYFNKYVELVVYGDDNLIAIHDDVVSFFDGPIIKEKLAEVGVTITDGTDKSSPTLLRKPLESLDFLKRGFRKIEGGMYSCPLDKGSLYSRLYYSAGGKGGLFQLDILHDNVKSFLEELTHHADHYEEFQRVRSFYIKRIPSWSATLPTYATCLNMMEGQRNSATPWQPHKFIETRPSGCETKMMAGQDNHAQKICVTERIIICGEKYTPPILETSFVVSIDNPLYIGERGEYVKTEFGSGMGRLPTDAWIKAFSSPKKHPQLFEAYKMGATIYFRSCMPYLNAWCAVCKFALAHGIDQSSIIAMYESCKPRGAGDIAPLVAVKAYTKFVNRPVFKFKETVHKEVLEAHNSVRVA

SEQ ID NO: 519 - DNA, 10749 bp, Citrus tristeza virus
  source 1..10749: mol_type = other DNA
atgtcgaaactcagaggaagcttctggtcttcggccatcgctgttaacagcgattacacgatatcgcgcatctggcgcaaacttaacaccatagtagtcctgcactactttggttttgttagaatcaccaaggtgattcgtgacaaatcggctgatatgccgatagtccctttacggaaatctgtatttccgttttctgttcgcgcggctgtcacgagcttcgtgctgctgggcgtcctcttgacgctccgcattcagggtgcctctgtggccttcccgttatcaacgcatctggcgttgttcgtccccgctctgttcgcgggtttttcgaggttttctctgtgcaaacctccgctcacctctgccgctaagaggtccctccgtcaggcaaagcgggaatctgtttccctttctagccgggcctcttctcgcttctctagggaagtccctcgcggcacacgttcaagacttcacagacgtgtggtgagacgagctgacactgccccagttgagagtccccaagacaagcctacccgacgaaacagccgacttggtaagacttctcacctcccttacgtgggggaggcagcgttggatgatatccttcgctggatcgaagaggttaatcctcatccctcgatggtcgctattccagtgcccatcacttttggaaccatgcctgcaacggcttggtgttcccactctgaagccgcagttttgcgtgccgccttgactatcacgcggctgaaactgatttctccactcaggagaaacacgtacggtacgtctataatgacgtatcttctgccactaaccgtccccgtacggtttctccccgcaagtgcgtccatttttcccagtaaatctaaactgggcgttgaggtcccctctggtagggaccttcacactgcgttcgtgagatcttctcacgcgagcgctttcttctctgacgcggttcgcgcttcgtttgttccgtccagcgcggaacaattttttcacttccgtcgtcagcggacgcatgttcttgctattacagacccggtcctgtgtggtacggtgtctgttttaatgtcggacggtgttaacacagcacgtctcgacgttgttgctccggcgtactatgcgtacgctgaatctttgggcgccagagtgcgctttttgtgggagtcgtccgacgtggacgacgctaaagttcgtgacggtcaatgttatgtccgtcatgtgttcgacgtggctctctactttgggagacgcgccgacctttccgtgcgtagagcgctgggtatgtaccccacagtgggtgcactaaaggcttatcttgttcgcgaatacggtcgcgactctcttaaggttcctatgcgtgggacctacacttttggcagtgtgtttcactgcttgtcgctaaatcttcaagtcgacctgcgatctattcctaaccatcatttagttggtgggacgtctgcccacgtcttaattgggcaggttcgagtcagtgttcctggctcgattgttaaaccttcacgttcggccgttcgtaggcgtaatagacgcatgcgacgtgatggttttctcggtagttccggttcttcttcttctgcgggggagtcgactcgctgttcggactgctcttctcctcgcggtttaccttctccttccgttttaaaaccttccctaggtcggatcccgagtatagatcggcggttccggtttcctgcgggtacgcagttgcgcgtctccgtacctaggcgggtcgatgaccatgtttacgtgtcgactggtagcaacttcgatgagttgtgccatgcagttttgacacgtatgtcaaaaggtacaactctagaaatccttttacactcgattcgagagcggaagggactacttggttttgcggcgtgcttccgttgggggtcttcacacgtgtttgtaaagcgtggcaactttactgcccgatttcctatttcggcggtcaggtatgagaatcagtatgccgcggttatgatggatgtggggactagttgggttccgaagggctacgttcccgatgttgatgttgtgaaacgtcggagaagtcgtaatcgtcgttttcctctttcccatcgtgcggtggatcagtcggtccccgcgttacagtcgagtcctgtcgaggttgcttcggtttcgagtgataagccttcatcgtcgcagaaggcttcttcaccttctacttcttcttcttcttcttttaactcgacaaggagttcagactgggtgaatgtcggtttctctcatcgaactactaataaggttcgtgaaccgcgttatgctggtcatcgtaggatcggaaattttactttcccgaggggcacagtgtacaacacgcctgtcgatgagcgcgcctataaacgtgttcttagattgcgagataccacagcctgttcctttctccgtatactgctagctcgtttgtcgggttacagacctttaagtgacgagttctttaacaagtgtgtcacttcccggtttgtcgcgtgcattgaacctgtggaatcaggtctcgttaaggtgcatttccgttctgatgttttccgtgcctctttcccgtttgacggtcaacctatacaccccgccacggctttgacattggaagtggtggtctcttgggattggatggttacggcttttcagaatcccttgaaggatggatattgctacattcgccatttcgccgaagttagtttgagcatggggcgaattttcttcaggagggacgtcgacttgggacctttcccatacgttttcgaagtgcaacaccgtcttgaaaggttgtacgggaaagctgcgttaagatacggtgttaggggtcaatattcagccccgcgctgttttcactgttgctacaacgattcaccgagaccgatggcgtcctttaatgggtaccataagatgggtggtgaagataactccctgataatcacagacaccgacaggttgcgtgctgtggggagtgcctatgaaaaagtgaagagaaacataccagattcgttattggttcggtctgtagaaaaggaccttatagagtttaatcagactctagtcgacatgcatcgatccagaccgggcgttgtcgtacctttccaaatgagtgagaatcagcaagtgatgcttactagggcgtacccggaatttaatattaattttattcattccgtacattccgatcatccggtggcagcaggttctagggcgttggagaatcatctcgttcgtaaacacgctggtaccgattattcggatgtggggggttgtccgctgtttcatttacgtgcgggtcactccggcgttcacgtttgtagaccggtgtacgatgttaaagacgctcatcgtagagtagtccgtcatcaccaacttagtaaggtttcgctagatcagagtgacggtgttaaacaagttggctggaccgtaaacacgaattctgtatgcggtaacattttgggagagtgttatcatgcatcggaggcgatggttatggttcaagtttatgacgtaccgctacgtgagttgtgtagggctatgataaacaagaaaacttccgtgtgttatatgaccatggttacacctggtgagttgttggacgcccgcgagtccttttttattaaggacttggattgttcggttgagttagatcccattgcagacagggttgtttactgtttcaacaattctgcgtatacacacacgtactccactatatgtgagtgtatgcgaactccttgcttggtagtggacgggtttttgtttactatcgaaatggtatcgctcaggtgtagcgttaattactattgtatcaccaagtcgtcggtctgtccgagaattagtgagactaagcggttgcgctaccgtcggtgtgatagcgacttgattagaatcaaaattccccggtactccagtaagactcgtagttgtttacctgggtgttactatttgtacttggacgccaagtttgtaagtcgcgtgtacgagtacgtggtcaataactgcgttgtggtgaacgcgaaaacttttgagtggacttggaattacatcaaatcttgcaagtcgagagtggtgatcagcgggaagattatacaccgagacgaaccaatcgctttagagtacttagatgggttttctgcggttatgctgtccgctggcgtgaagggtaggcaaaacgcggacgtttctagacgcttagccgctttttcgggtgaaacttcgattttcgagttagtggggtttgctatatccgagaagtgccgcgacttgttcttgggtattcaggacgctgtggaaagatgcgtgaagtcgtacctcaggaattcgtttaatatgagtttcgtggacttgtccgaccccttacttacgattagcgaatattcagaattggacgttcctatcgacttaccgggtttcggtggaatagtggacggtaacgaaactagacttatggaagacggtgttaaatcggctttattacgtaaagcggttcaagccgaggctcagttgagtcttaagagaggcaatacttccgaaatcgttccgtgtgatgacgatgacgactcgaacggtgatgattcgcgtgtttcgctcgatacggactggtggttcgtccttcggggtggtagttctggcgggttgcgagctggagccgccccttctttgtttaggtgtttactcaggaaattgggtgggggtttatgtttggcaaagaaagtgttggaactgttagtcaagcgggtggttgaatcgttttctcgtttgaagcggaaaaccgctcgtttaacgtccttcgctaatttgttgcttgcgaggctctcttgcgggtttttcgatgacactgttttttctgcggtctgggaaatagcgatcaacctgaccaggatcgtcgatggagtagtcaagacaaaactggggtgctttcgtaatttatttcgattgattcccaagttatacgctggttgtaaggacgttgtgaaggacgttagtaacgcttacaggtcggttgtctcgttttccgctgaggttttgggtaagagttactctaaactttgtcagttttgcttggaaatatttgacatcgggcttattgaggtttctgctcgtaatttgggactggaaacatgcgtttcaatagcactagctatttttgatgtgttgattacttttcctttggggagcgttagttttcccgtcgtttgcgctagggttttcggtcgtctcgctatggaagtgggatcgaactttttgtttaagaaagttttcggtaaacccgaaactcttggtgaagatactttccgtaggactgtgagtatggttttgaggcccaaagcgtttgacaagctttccgtggatgcgaaaggtttagttaggtgctctggtgttattcctggagtgttaaggataatactatcttccttgttttccgaagatgacgcttgggtgggttatagtaaacatgaagtttcttcccttcctattgttaccttttgtgtgaagagattgtcttattctctggagcggtgtaaggaagcgtgtgtcgcatttattgttgactctgctaagaagattttgaaatctttaacttcagagttcaacgaatccattcaaaactccgacttgaccagtggtgctaagtccttgtacgggcacgtgagctcgatactttacacctctagtggtgtgattaataaagcaggaagcgccgtcgctactgttaaagcggtcgggagtgatatcagtggtcgtgtgaaacgtatgcgaccccgattttctctgtcccgtcactttgacgagcagactagtgagtactactctgctagcgattgttccgaactagatgagtcgttgtttagtgaaacgcctggtcttcgtggaaacgccaggtgtagagatttgtttcgtatcgtgtctagacgcgcggtagcgtgttgtgagtacgtgacaattcttttgaaacggctagcgtcgcgtgccggtgaatactcctactcgtatgtgatggatacgctcgtgagattgtatgtggcgaccgatgatgttgttagacggtgcaggtcctttacgttcgactgtactgataaagcatctaatttcgtcaccgggtttcttagttggcgcagcttacgttctggtgcgtactctgcaactccagggttgggtggtggtagtagaggtttaacgtcgttttctcacaccggtggattcacgcgcgttatcggcgctcttgggaacaccttatcggtggtgtttgatgaggaattcttcagaactttgctgcatcggttgagggcagatgttgtggttttactggtggagttcttgaaaaaccttcccgtttgtttgttttcaatatacacttttattgaatgtcggggtaggatctttcctttaagagagttcctatggggtttttgtcgtttcgtttgggatgttatcgaggggttgtccatcaatacttatcaatacctctctgctgtcgctgagaaagtgtatcgaggtgcctttaatcgtcgatttaacgaagaggatgagaggacgcttcgagtgatcacggaagcagagggaagaatcgaatttttgcgagttgttctcgcggaaatggaaaggttccgtgctgcgtcgaacgaggtttcttcgtcgaggtcgtctgatagtccttcattcccacctacttacggtgaaattgaggagttaaatgatgattcctccgatagtgcgctagtgataggcgtcgacaacggtaccggccgcactatcgttgacggtgagaccgattctgcgtccggtagcgatagtgacgtttctatcccgttggatcgcgattttgaacaaatcgggcgtcttggcggaaacggtaacgtcgatgtcgttcggctgggtttgaaattcgttctgaagttgttacgcaacctattcgatgctagaagttttaaagtgttgtatgggttgttacttcaaacccttttttatggtggttcggtaaataaatttgtgtgtcgtctggtctttagtcttgggacttgcttacctttcgagttactccgatttgcgtgttcagcgaggcggttgttgaagagtttggcatcatttgtttaccagactaaccttttcagcgaagttatggtggagcatttgtttagcgtttcccgactgctttatgattcccggtacttcgcgactgtgttttcggaattggagagacttaacttctatttagactatttcctttcgctcccgaagagatatctattccctaattctagggctcgtagttgtgctagggttccggttcccgtgattaggaccgaaggagtggcaccagtccgtgagagatcactaaatgacatactggactctttagactctttaaaggtgtcggacctcaaagggaagtcgacgttcgttgatgatggggagtcggattccggtagtgaacattcgggtagttcgatttcgttcggttccgtcaacgaagaagttttaaatgcggtaaatggtgacagcgtttgcgaaaaagccccgttgatgaagcatgttaccgcacttagcaggttggaacgccaccctagtggtcgtaaagacattcctgtttctaggaaaacttttgtgcgtggtgaatcttcgggtgtgaaatcgaaggtgagtatgtgcgattacttggtgaccttgaattcttcgtttggcacagtgcctgacatgtaccctgttgcgcgtgacataacgtataagaaactgactaacgccatgcgcgaattctattactcgcaaaaaataaccttgtacgaacttcacgggaagttgagttcctattgggacgagttgaaggtcgcaggtttcgatagaaagttaacgagaatggatttggacgatgatgtctatgttgttgactttaatcggaaattgttggtggggagaaacggatctcatccgtttcgtaatacgttaaagtcctattgttttatgttttgtaacgatgggttggttccttgcccgcgttctcagaaatatgattatgctttgatttctaatcaaacgtcttttgttgccgcgaattcgttcttacgtgccgtggatggtaaggatttgacttttaccaatgaggaacatagccttatcgtttatgaagctcctcccggtggtggtaagactcattctttggtgaattcgtacgcggattattgcgttaaagtatcttgtttagtagtgaccgctaacaagaattctcaaaccgagatatctcagcgcatatctaatgaattgatgggcaggaagctagctgctaagtatgttaccgatgcagcttccagagtgttcactgtagattcttacttaatgaatcacttgcgacttacgactcaactgctgtttatcgacgagtgcttcatggttcatgctggggcaattggagccgtggttgagttcacgtcttgtaaagcggtggttttctttggtgatagtaagcaaatccattacattcaccgaaacgatctcggggtttcctttgttgcagatattgatgcgtttattcaaccggaacatcgtatttacggcgaagtgtcctataggtgtccttgggacatttgcgagtggctttccgagttttacccgcgacacgtagctactgctaatgtagggagtattgggaagtcgagtgtgtcaatagaggaaatcaatgggtgcgatgacgtaccttacgacaaggcggcgaagtacattgtgtacactcaggctgaaaagaacgatttgcaaaaacacctcggtcgcttaaccgtgggtcggaacaaggtagtaccaattgtaaataccgttcatgaggtacaaggagagacctataaaagggtacgtctggtgaggtttaagtatcaggaggataccccgttctcttcaaagaatcatattgtggttgctttgactagacatgttgattctttggtttattccgtacttactagtaggaggtacgacgatactgcgactaacatagatagggcgaaggaaatttttgacaaatttcgttcgtcgaatcactcgtacggttcgtcatcgttagagtggtaccttgaaaagtatcctaccgaatataagggtagtaaagcatcctctgctccgataagttgcattaacgaatttcttaatgaggtcgtcgttggttcttctgtcgtgcagttgggtgatgtgtctgaagaactaagttcacgtccctttgaatcgggttgtgataatgttactgtagagacaccgcccctcctgactcgggtaacttacacgaaccggctcgcgttcggcgtagtaaggtcacaagcaattcctccaagaaaagcgtcactgcaagaaaaccttctgtcgtacgaaagtcgtaattataactttatcaagacggaacggtttgttggaccaagcgaatttggtagggcgatggctgctgctgttatcgaacgttgtttcaaaatggaagagatggctaagataaggtgtgatattatatcccttactgaagctaacattttaaaatggctcgataagcgcactccctgtcaaataaaggccgtacacggggagttgaaacttcccttttcggtggaggagcaaatttccaacttcaaactgatggttaaacgtgatgctaaggtaaaacttgacgattcaagtctatctaaacatcccgctgctcagaacatcatgtttcataagaagtttatcaatgccatattttccccgtgtttcgacgagttcaaaaatagagtgttgtcctcgcttaatgacaatatcgtgttctttactgagatgacgaacgctgggttagcggaaattatcagaagaatcattggtgacgacgacaacttatttgttggggaagtggatttcagtaagttcgataagtctcaggatttgttcattaaagagtacgaacgtacgttgtattccgagtttgggttcgataccgaacttctcgatgtgtggatggaaggtgagtatcgcgctagagccaccacgctggacggtcagctgagtttttcagttgatggtcagcgtcgttctggaggttcaaacacttggattgggaattccttggttactctaggtatcctttcgttatattacgacgtttcgaagtttgacttactcctcgtttctggagacgattctttaatttattcgagtgaaaagataagcaacttttcttccgaaatttgcttagaaacaggttttgagactaagtttatgtctccgagcgtgccatatttttgctcaaagtttgtggttcagaccggtaacaaaacgtgttttgtgcctgacccttataaattattagtaaagttgggggctccacaaaataagttaaccgatgtcgagttatttgagttgttcacttcttttaaggacatgacgcaggactttggtgatcaagtggttttggagaagctgaagttgctagtcgaagctaagtacggtttcgctagtgggaccactatgccagcattgtgcgctattcattgtgtgcgatcgaactttctgtcctttgagaggttatttcctttcattaggggttggtatgttgttgacgctctaaaactcagacagcttaggaaactcactaatttgatctgtgaacgtgtagtttacgacaatcgggtgagttatttttcgtacttcgataacccgttcactaaacctgacgctaacgacgataacgtggacgacctcggacaagcgggtgaattagcaaccggctga

SEQ ID NO: 520 - DNA, 3171 bp, Spinach latent virus
  source 1..3171: mol_type = other DNA
atggatacaattgttcaaatgaaagtattgtgttacgagtcgatgatattattaatgataccttcagacgtaaacgcaccaaggccggaaactgccattggtaggttgatttccgatgccgctgtttcaggtgttttgcgacaatgcgatttcactgcagcggaagcctctcaatgttttgttccaattatcaccggaagatcagaatgcattgagacgcgattttctggaagagaaatacagtttcgcaatttttcgtattcctcacaatcattcgctgctgcgcatcgagtgtgtgaagcggattatatttatagtcgattccagacgagaaataccacgatcattgatattggaggaaatttttgcacccatagtaaaatgggtagagataatgttcattcatgttgcccgatattggacgttcgtgatggagctcggtatactgacaggttcatgtctgtggcgggggctttggaaacccagcctgaccgtgagctcagactgaactattgttccaataaatttgaagattgtgatgtttccgcaccatgggcgatggcgattcactcgatttcagatataccgatcacaagtgttgttaagcattgtttccgcagaggggtcaagaaattgatagcctctgtgatgatggatcccatgatgcttgttgcttctcaaggttttatgcccagattgaatgttcaatgggaaattgaacctgatgaggagaacaaaggttcccggcgaatttcttttcatttcgtcgatgctcctggattgtcatatactcataactatgacgtgcttatgcagtacatgacttgtaatcaagtcataatcagtgggaaagccgcgtatcgagttgagcgcgttgcagatctgtctggtgtttttattgttgagattaaccctggcggcaactgctggaatgaaagactggatctagttcccatgcgagatgtttcatgcgcgtggatgacttcgttaaaacgtaagaccttagtgcgggttgccatcccgcaatatattcattcatgggaagttaagtatgtgattgccgacactgattttgttagaagagttgctgaagtgtcgttccgtcagtataaaccagaaacaccattacaggatttggtgaaatctgttgcgacgatgatttcctctgcttctaaccattgcattatcaatggtgtcaccatgcaaactggtacaccgttggccattgaggactatgtcccaatggcggtgacttttgttgccttcgctaaatcaagatatgattcgataaaggaaggcatgaaaatggttaggcagagaggtactaatatcgcggatcctaatgatcattatgattatgagaaagatggatcggatgttaagagtttttcaaatcacataattcccatgaagaataccatcaagtctctgtttttccccatgaaagtgaagatgaatgataattctatgctcatttatagtcaaggaatcttgtcaactgttgttgatgagataaaaacactttttggatgggatgtttgggacactgacgatgcggtaatacagtctctgccctctttttataagatggaggatgtttttcaagttacgtctgaccactattgtttatcacatacattatctgtggattggtggttggagggactgtatgattcttaccatgacatgcgtgttgcgcataaaaagaaacttgatgaagaagaatctcggaagaccaaggtcgagaatgccttattgaaaattgctgaggttttggagaaacctgatgttagcgatggtcttaaagctctttcagaattgcccataatatcatcattattggagaagaagagcgaagaaatcgttacaaaacctcaatgcagggatactgaaaaaccccatattaatccctatgctgatgcaatcaaagaggcgcaggcctattacgaagagcttgaggtcgtaaatactcgcaatttgagaggtgttggtgattacctcttttggcgaaagaagtcgaactatgccagcgtttggggcgctgatgaatcgagagtggttcttgaacctatggcaaggaagttttactctcgagatagaaatgtttccatacccgagtatgagcgaggtatgacggttgatggtttcgtctccattaaatgggtggacggaaacattactgaggacacgtggaagtgtctttccaaatacgcagttgttttgctcgactcttcttgcgtgtttgatgccggttcacgtattatgccaggtctgaaaaaggcattggtaatggatgcaaatttcaaaatcgtgatcgaggatggtgtggcaggatgtgggaaaacaacatctctcctcaagcaagctaagccggattcggatttgttgttagctgccaaccgtgagactgcaaatgacgcaaaagccagcggcgttattcctaaagcgcttgaataccgagtgagaactgtggattcttacttgatgttgagaacgtggttcacagccgagagattgctcgttgatgaatgtttcttggtccatgctggcttggtctatgcagctgccaccttggcacgagtgaaggaagtaatagcttttggtgatacaaagcagattccattcgtgtctcgtataccaactgtcaaactcagacacgcgtctgttgttgggacgttgaagccaagaacaattacctacagatgccctagggacgtgacggcagtccttagtgagaaattttatggtactaaggttaagacgtttaatcttgttaaacagtctttggaattgaaaaacatagattctagtaccgaaatacctgtagaaaaggatacgctatatatagcgcatacccaagctgataaacatgctttgatgcgtttacctgggatgaatggtatagaagtgttaactactcatgaagcccaagggaaaacaagagaccatgtgatacttgtgcgtttaagtaaaactaccaatttattatattccgggaaaatgcccgatgctggtggttcgcacaatcttgttggtctgtcccggcataagaaatctttgagatattttagtgtctttgccgatgatccagacgatcaaattgcgactggaattcgctggtccaaaacattggatgagcaagagttagcagcttatagagctgctggttag

SEQ ID NO: 521 - DNA, 2394 bp, Spinach latent virus
  source 1..2394: mol_type = other DNA
atggattcttaccacttcttatctcagttgtgtgacttgaatgttctgactcatgcgctttatgttaatcaagtgtttgagattgtggatcagtccacaactagttatatgcagatgtggctttattcccgtgttattgtcccagttttgaaatatcatctcagtggagatattatattggataaattgcacgatgtgttccttggaacctttcgttcaatgatggtgccgatgattatgttgaaccgactttcattcgtcgtgaagatgacgacgatgaaccaccaccggaaagcgtatttgccgcttgaagaaagggaaaaaattcatgctgcgacgtttcttggtcatgatcattgggcaagcgttacttcgggatcatctttttatgatgatctcgaaattctcgctgatgagaccgtgaacgatgatttgcattttgataaagaatcttccatgccagatgagtatcagatcatgtggaatgatggtacaattgattccgtttggtctagtcagtttgaatgcgaagaaccaccgaaaccgaaatttataccacgcccttctgataaggtgtgtgatccagtggttattcaagatgccgtgaacgatatattcccatttcatcatgagatggatgatcgatatttccagacgttagtggagacacaggatatttcccttgaggtttcgaagtgttggatagatgcctccaatttcagagattttgttaagggtccaaattcttatgttgagcctgtgtttcaaaccggtgccactagtaagagagtgcatactcaacgtgaggctcttttagctgtgaagaaaaggaatatgaatataccggaattgcaatccactttcgatcttgatgcggaagtcaacacgtgtttcaaacggtttctcacacacgttgttgatttgccacgattaaaaaggttgcaacctatgactggtgttgaggtggaatacttcaatcaatacttgcttgggaagaatccacctgtgaaggaatatcaaggtcccttgacattgactgcacttgataaatatatgcatatggtcaagacgattgtgaaaccagtcgaggacaattcgttgaagcatgagcgacctttgtgtgccactattacctatcataagaagggtatagtgatgcaggcctcacctcggtttttgagtgctatgtcaagattggtttatgtcttgaaatcaaaaatccatattcccagtggtaagtggcatcaacttttcacgctggatgctggaaaatccgatgccgtaaaatggtttaaagaggtggatttttcaaagtttgacaagtctcagggcgagttacatcacaaagtgcaggagaagatatttaatgctttaaagttacctcccggatttgttgagatgtggttttccgcccatgagcgatcacacattgtggacagagaagcagggattggattttccgttgattatcaacggagaacaggagatgccaatacgtatttgggtaacactttggttactttgatttgtttggctagagtgtatgatttatgcaatcccaatattacctttgtcatcgcttcgggtgatgattctttaattggaagcgtcgaagaattaccgcgcggaccaggagaatttatttacaaccctgttaattttgaagcgaaattccctcataatcaaccatttatatggctcaaagttttagtaagtgttgatcttgaggatggtggaagagaagtgatcgctgttccaaaccctgcgaagttgttaattggtatgggaagacgagactgtcaataccaagctcttgatgatttgtatcaatcatggcttgatgtgatatattattttagagatgctcgcgtgtgtgaaaaagttgctgatttgtgcgcatatagacagacgcgaagaagctctatgtatttattaagcgctctgttgagcttgcctagttgttttgctaataagaagaaatttaagtggctctgttatcgtttaagagagcaagggtgtctgaagaaggatatttatcctgtagcaaaacctataagtgcccataatataaggaaagaagattcaaatggatgcgatgttaatcaaggaacagatgattcgttctcacggaaaaagaatcgtggatgctgggagtatgtcccaaagatgttgcagactgatgtgtctgttcctgttactgataaatctttccacagtaacagaggctcgtcggtttccccaaccgattgcggtgatggagggtgctccagatccgccagctcgattggtagtaaaaataccaaacctcgccatagatttcgagctgcaggagttcaccaacccagcggtcgtgatccagaccgtataccgccgaatcatcgacgaagtgcctaa

SEQ ID NO: 522 - DNA, 2364 bp, Olive latent virus 2
  source 1..2364: mol_type = other DNA
atggccggagtactttatgatgaggagtacgttccccaggaaccggattacttgtattgcccgtacgagtgggagggtgaagatcctacccaatgcgatgcaaatgttccgtccgtcagctaccttgtggaggctgtaaaaaaatcctttactgagggtaaccacgatatgctgatttcttgcgagtcgtaccacgccgagtgttgcgagggtcccttgatgaacaagggtttgaccctctcgacttactttatgagttatccgggcatttcattacctgcgttcggcggtggtgtgattcatgtcacttcagctcgcgtctgcatgcaagctttttatgccgtgaccccaggaaggtgtagttgttcgtgtggtacgcaattcatctatcgtgccaaaggtggaactggtctaacatttgacgccacgaacactatttctagtgcctttaagttcgaagacgggaaagtgaaatggttaacagaagacctaggcttggcattattggctggttgtttcttgaaatacgtgccaatacctcatgagattgaaattaagatcgaaagaaaggtcgagcccgtgtctgctctggatttttgggaaccagaaggattgatttctgacgtacatttcgtacatccgcaagagagagccttggctcctgagcctccaatggatgtagagatggtgagattagtccgtacggaattgtttgaacactttaatcccacccttcttctgaacgctcggtcggatttttccggtgagaaactgaaagaggttgagttgccacgagctcaatcggaacccttagtccctagggtctgtctcccgcgaggtgatgacgctttaattgatcagtttttcatagacaaggcacccgagcattttaatcgtgaacctgccacagatcaatggcaggtggaatctgatgactttactgtggatttccccacccaagtgcgattacgcgaacgggacgaagattggttcagaaggaaacccgatttcgctgtgtcgtccattcgtacaggtctcgagatgcctcgaattgctacaaagaaggaaatgttaatggcattctcgaagagaaacgttggagctcctcagatggtagaggtacctcaggagatccacgtgaagaggttggctgataggttcttccggacattcttgaaagaaggcggctgggataagggggatggtcattattgggatgattttttccatagaaagggtcgaaaggtcttttcattggagaattgttacgatgaccccttgtcctcatacttagttatgctgaagtccgctgggaaattctctctagatctgaactttccggttcgatcggtaccccaaaccattacttatcatgagaagtgggttaccgaggttttttcccccatgtttctgcaggtgatggcaagatttttctctcgtctgcaagattgggttgttgttccggctggtccgatggctgacttctcccgtgtttggcctagctttgaggggaagtgtttaacagaaattgatctgagtaaatttgataaatctcaaggtaagctgttgcatgatgtgcagagggagattttcctccgtctgggtttcccacccatttggtgtgattggtggtttaaattccacgagtcttcctatttaaatgataagaaccttggtatagctttctcagtagattaccaacgtagaacaggcaatactgccacttactttgggaacacgttggtaacaatgattatgatggccgaagtgtatgaacttgattctctccctttctgtggtttgttttcgggtgatgacaacttgatcgtgactgatcgacctcttgaaggtcgagtttcgttattcccgaacatgttcaacatggaggccaaggtgatgcgtccgggtcagaattacatgtgtagcaaatacctttgcactgtagacggtcgcgtaacccctgtccctgatccttttaagttgctgaagaaagctggtgcctcgtgtcctttggagcaccttgatgacttttacgaatcgtttctggattataccaaatacctggtgagggatgaagttagaacattaatacccaggttgatggcccacaggtatcaagtctcgatggatgaagctggagttgctcttgatcagattatgagctggcgaaagtcaaagactcaattctttaagcatttccagtacaggaaaccaatcaaggactcgctcgaggctgtgaaatccgacttcctttctgctttcggaaaagtagatgatcgaataagagtttggcgcgggcgtcgaaccaatcataagaaggaggtcgatgctttaaaggtcccattggtgagttttagggagtga

SEQ ID NO: 523 - DNA, 4950 bp, Citrus yellow vein clearing virus
  source 1..4950: mol_type = other DNA
atggccactattaggggtgccatcgaacgcattacagacaccaccgtacgcactacacttcaagaggaggcatgccgccaaatacgcgctgaacttaaaaacgtcgaacacatcaaccgttacgctatacagcctgacgccgccgacgcactcgaacacctaggcattggttctaaccccttctctgtggcactgcacacacacggtgcctgcaaagcgattgagaaccaattactctatgtagttggtaccttactcccaaaagaacgtgtcaccatgctcttccttaagaaaagcaagctcaacatcatgaaacgctgccctaaattccaagacatcttcctgaaccaacatattgaaccacgcgacgtttctaggtactgcgactttaacgtccaatccacctccaccagcatacccacacgaacggcttacatcagtgacacactccactttatggaccgtagagacctagtccgactattcctaaacagcccaaatctagagactctctacgccaccattgttctcccagtcgaggctgcttacaaacaaccgagccgctacccagagatataccagattaactatgacttcgacggtttccagtacatacctggaggccatgggggcggcgcctaccaccacgagttcgaacagctgcaatggttagacactggccatatccactggcgtgggcccgactgtaaagagattcgcatgacaattaccgcccaaatgctcgaaagcttaggtgcgaatcatcttttctgcttcaaacgtgggaaactactcaccccacgtgtacgcactttcggccgagatacccaagtgctcttgcccaaaatcttccgcccggccgacaaaaactttaacagggcaataccactaaccctagctaacaaactactcctgtacgctaaatccattaacacagtgaccttccgcgacgtcgttgccaagacacgccaacttatgaaggacaaggagcttgaaacatacaccggcaacgacctgttgcatatggccaactatttcttcgctgttggagcactgtcaggagttaactcctatgaccaattgcttggcctatccgcctgggaagcctgcaccgtccgtatcaagaacaccataacaaatctctgggaaaagattgccggaaagaaagagttcggcaagctattggaggcccttgagtgggaaacattcacatactcacgtcaagtgaccgaattcaccgttacgggactgcccgccctgctccccctcccagacatctcagaccaagaagagattttcgcccagcaggacgagttagacaaaatcactgccggcgctaccaagatacggactattgacattatgcggggacaagctaaccgcgctaacccaaaaactccgatcaactcaacaccggcccagggaccccaactgcccgatacccccgacccaatcgaccaagctgcctccaaagacctcgtcaccaagcttcagaaaaacaaacgcatttacatccaagacgacgggccggaataccttatgggacacatggctgaagtccctgcctggtatcttgaacaagatgataccaccactagactcaaaaaccgctgcgcttggttcttcggcccacccacctacagatatgggcacaacgacattgagtacaccaccatagaatactacccttgggtcgagcgtattggagccattttcggcaagtacaacacctgtcttgctcaaacttacgacgccggagcccgtattggataccacgctgacgacgaagactgctacgaccccgacgtcaccgtggtcaccatcaacctcactgggaacgccaccttcctgctcaagaccccaaccggcactaggacctggaaacttaaacctggtgacttcattatcatgaaacccggtgcccaaaggtgcacaaaacatgccattagagattgcacaactaaccgcacatccttaaccttcagatggcaggcccgcacttgccccactaacctcagaaagatcactaacctacccaaagccaccaaccaaccccaaaccactgaatggcgtcctgtaactaaaccacgccctagcaccaccgcttccagcgacacccagaccccacttgtcatagaccaggaacgagggtataccaccacctccgacgtgacaccaacgattaggctgcccgccgaaaatggtaataacaccggtgctggaccctcctccgcattaaccctcgccgacctgaatgataaccaagcgccgaccactaacaaaggaaaagagaaacttgaggaaatggtcgaaactggcccaactatcatggaacgcttcctcaacaccgttcaggaaccaacacaagatttatgggactccgcctctgaatccgccgcgagctacctcgctgaaggcctcggcatctctgccatccaagcactcccttgggcacctcacttggaactcatcaatgcattaggcttccagggcactgaaaggcaatacggcccagacaactgtctcatatggcctatcacgcattacagagaattgcccagaagcaacaatgtcgaagcccctccggaagtgcttgagctgctcgactgcatcaatagataccccactgacgtcccaatgctcaaaactcgagccgccgccttcggttcagacgtcaagaatctacgcataggggcacttgttaagaaccaggacaaacagtggcgcgcatcactcgcactactttgtgaggaaaatgaacacctcctccctaccactgtaatacacggcgctggtggctccgggaaatcccacttactccaacagtgggtggcgtctactgagcgcggaaatgtagtcaccatcttgcccactatcgaactccttcgagactggcaaaacaaatgtccacatgcaccgaaagagactttcaaaaccttcgagaaagcgctcatccagaacagcgcccccgtggttatcatggacgactactctaaacttcccccagggtatattgaagcctacgtcagcctcaagggccagtgcaaacttctcatactcactggagatcctagacagagccactaccatgaggagaaccctgaggccttaatctctactcttgaccccgccacggactactttggcaaattttgcgcatacaacatcaacgccactcatagaaatgccaaaaccttcgccaatgcgcttggggtgtactctgaaaaagaaatccccaccaccatcacctgctcatcctaccagaaaagcggttggccaacacttgtcccatccatccttaaaagaactgcgctcaacgacatggggcagcgctcactaacctacgcaggctgtcagggactcaccaccccaaaagtgcagatagttcttgacaacgccacaccactatgctctgacaaggtcatgtacaccgcactatctagagcggtggaccaaattcacttcttcaacactggcccaaatcacactgattactgggaaaagatgaacgccacacctttcctcaaaactttcatcgaccacacacgtgaggagaccttcgctgagcaccaacctgccgaacccacagtgcgtgagtacgcaccagcaacgcatttcccaccggctaacgagaacctagcactagagccgtgggtcgaaccgctgactgataaacactcgcgggaactcttccactctgccttaggccacagcaactgcgtccagactgaaaacaccgtagtccaactttttccccaccaacaggccaaagacgaaacgctcttctggaaaacaatagatgccagaatcaagataaccaccccagaagagaacatcagggcttgcagcatagccactgacattggcgacatcttgttcctaaattacaaagaagccatgggtttaccacaagaccccatacccttcgaacaggcactctgggactcttgtcaagccgaggtgcaactaacctacctcagcaagcctctggctgcactcgcaaatgccgcccaaagacaagaccccgactttgactccaacaaaatccaactcttcctgaaatcacaatgggtcaagaaagtcgagaagatgggctgccttaggatcaaacccggccaaactattgcttccttcatgcaacagactgtcatgctatacggaactatggctcggtacatgcgccgcatccgcacctcactttgcccacccgaaattatgatcaactgcgagaccaacccaaaccaaatcggaacatgggtgcgtgagtattggaacttcaacacccagagccatgagaatgactttgaagcgttcgaccaatcccaagacgccaacatgttacaattcgagctcattaaggccaaataccactcaatccccgaggagatcatcgccgggtatcgacacctgaaatgcaacgcccacatcttccttgggactatatcgatcatgaggttgtctggtgaagggccgacctttgacgccaacacagagtgctccattgcatacaaccacacaaggtactttgtgccgaaaggcaccgcccagctctacgccggagacgactctgcatgcgcgtcgcccctctctgaaaaacccagcttccaacatatctcaccagagctcagcctcaagtctaaggccaagattagaacccaacagaaaggagactttgcgaccttctgtggctggctcatcactccaaaaggcctgatcaaaaaccccacccagctttacgcctcctggttattggctaagcacaacaaagatctcgcggacgtggccagaaactatgccttggacttacgcattgcctatcaacttaaagacgagctctatgagttattatcacctgaagaacttgaccaccaccaactgctcgtccgagagatgatcaagcacaaaatgggccatctcctcaacctccctgaggggtttaaaacaaactaa

SEQ ID NO: 524 - DNA, 5343 bp, Potato latent virus
  source 1..5343: mol_type = other DNA
atggctttgacttacagaagtccattggaagatattgttggtgcatttgaaccaagtgttcaaacagctattgcgaacacagctgctaaccactacaagcagcttgaggaagagaagggaatcttatttaattatgcattgccacctgaggccaaacagaggttaataggcgctggcatatatttaagtcccttttccgctgttccacattcgcatcctgtgtgtaaaattttagaaaatcatctgttgtatgtagagcttcctagtagactagataattcttttatgtttgtaggtattaaaaactttaagttggatctgctcaagcgcagacatgcaaatctaagcatgatccaaactatcaatagatatgtttgtagtttagataaaataaggtacggttcaaatttcgtagttagatctagcgctagttatccagagctttgcagacgcaaaggtgagcttgacggagcagtgttgagggaattggtgcctgagttgatgattaaaagcgctaagaatctattcttgcacgatgagcttcattattggacccatcgggatctgattaccttcttggaggtactgaagccagacaaactgttgggcaccttagtttacccacctgaattgctaaagggtgcgaagaaaagtttgaactcttggtgctacacatatagagtggacaaagacaaattgtttttttatccagatggcgtccattctgaaggctacgagcaaccattgagtggcggttacctcctcgaaacaagtaggattaccacacgtgatggtgaagtttattgcgtcgatgttgtgtgcagtaaattcgcgcatcatttgattgcaataacccgtggtgatctgattgtacccacacaacgcagttttgctccctttgaggccataactagtaaaggtttgaataacttggtgaggggcaaggtggaatgtttccccgtatgcgcaagtgtagtgtctaaattgtataggtatttgcgcacactcaaaaaacccgatgagcaatcagcaatggccaaattgagccaacttcaggcaaatcccactggggaagagatacatttcatccagggctttgccaaattggtgataaatacaaacaaaatcgacagtttaatcaactgcgatagtattaaggtgttcatgggcaaattgtttggtccgttgcccaattggcttaccaagagattgaggagcgtgcaagaggtgtctctcgatgaatttgtccattactttgaaccatatgtcgtcaacgtgcccactaagcatgtgaactatggttttgagttcaattacgtaatggaagatttcaggtacgagcagggtgagaatgatctagtggatatgctagacaattttgatggctccacaaagatgagcacaagcctttgcatgatgaccccatacgtcggcttagcaccattgaccacgcgacgcaaattcctatgccatatcgaggagaattccatattcagagtggtgtctaggaacatcttttgtagctacacaaatagttacaaagtggccgtgagcactgagggggtggttcggatacttgagatttatagcaaagtgtctgtggatctactgggagcgtatttgggaaaattgctcaagaaaacagagttcatagagagagtgcgatcaagggttaaggcaattgccataaagcacctcaagtacacttggcaacaggttggtctagcttggttcaccagtggaaggcgtggctacacaaaatacattgattgcagcccatacacgatgaataccttcaaagagcttaaagagagatggggtgtgattgtgcgtgaattgtctaaacagcaggacaacgctgaagctgcgaaaaacatacctgagcaggaaattcaaacgaccagcaaaccaagttgtgtggagaagcgaaattacttctcgaacactttgatgactagctttgctgcgtcaggagtgaaaggcaaggaacaggtgagctccgaaattgccaagggtaggggtgaaaggagcgaattgagggcaactaaattgatgggctcatgcagcaccctcggcaaagtggctcacatagcatcaagaaaaggctccatgggggtattggaatgtgtagcgagggtcatcaaattggatttccaaaccgccttgaagttccttagagtcaagggtgtgtggatgcaggagtatgagagcataggcgagttggaggaggagcagatacagagtcctgcatatgatttttgtgctgcgatcgcaatgaccttcaatgttgaaattgaattgacgttcccaggctcagagcttgtttaccacttcgctgcaagttcaactgtgagttgtatccgcttgagcatttgggaaggcgtagtcacactgatgagggctgaaaatgattgcgttatcactgcatgtgcacaagctttagctagggagcctgaggatgtagtgaaggtgctcaaagatagattggaggagagcatactggaagagatttggaacggcgaaggggtgcctttcgagagaatgtatctcttctttgaagctctggatattcaagcacattgcaatcgcgatggtgcacagctagtgttgaatggcgggggcaagctggcgcgatgtttcgtgattaaagaagatcacatcgagttcgcaggtgagaaaaaggtcagtagagtacttgagctccaggatgctagaacaagtagtaaagcagacccagaattggtcaaggagtttcagaaagccgggactgtggtagaatatgtagcagtgcaatccagagcgcaagtcctggcgaagagtctagtggatgcaaccactggggtgtgcagctcaaccatattcaatgactgtgagagcttggaacgttcctttagattcaccgaaagcgaactagcgcgaaatgtttgttgtgttatcggtacgtttggggctgggaagagtaccctgttcaaggatatgatgaggcagtgcctagggaaaggtgttcactacgcatcacctaggaaggtgttggcgaatgagctcaaagctagtttgggtttggcaaaagggaagcggaatcgaaaagtagggacagagaattggaatgtgcacaccttcgaaagtttcctaaagaaggcgaaaaatgttgcagagggtgagttggtgatcattgatgagatccagttgtacccgcctggctacctggatcttctactttacctcatacctgagttcactagcgtcttcgcggtcggtgatccatgccaaagtgattatgacaacgagaaggataggcatgtcttcttaggggttgagacagatgtctgtaggcttctgagcggccgtgagtacgaatttaatgtactttcccgcagattccacaacttaggctttgaaagcagattgccctgcagattcaaattcccggctggagcagtcaaggaagagtatttgttcgttaattcaatgactgaggctaatgagttggacagcgcctacaaaagtgtgtaccttgtgtcatcccacttggagaagaaaatagtggagtaccagagtgacgttaaaacgccgaatgtgctgacgtttggtgagtcgactggttgcaccttcaagtatggttgcattctcatcacgcaagtgagtagcgcatgtagtgagcgcaggtggatcactgctctatcgagattttctcacaatctctgtttcatcaatgcaactggtgtgcccatagaaaatgtggcgaagagttacaaagacagaagtttgggaaaattcctgtgtggaactgctgttgagggtgatataaaatcaatggcttatgggaccccaatcttcaaagagcagttcatcgccggcgttgggcgcgatgaaggtgtcaaggaggataaagtcaccggtgatccttggttgaaaaccatgttggatttgatgcagctcccagatgttgaggaagcagagatgatgcaggaagagatgcaagaagagtggttcaaaacccatttgccacaagaggaaatagaaggggtcagatgccgctggattcacaaaatgctagctaaagaagcgagggaatgtagaatgggatcgatcgtttcagaccaattcccagatgatcatagcaagcaagaggggaagcaaatcactaatgcagctgagcgttttgaagctatatacccaagacatcgggcaaacgacacagtcacattcattatggctgtgaagaaaaggctgagattttccaggccttctgttgagaaagcgaagctcacgcaggctgaatgttatggaacttacctgctcaaaaacttcttggatgtgatcaagctcaagcccgcacatgatgaggcaatgatgatcagagcgaaggaagattttgagcagaagaaggtgagtaagagtgctgcaaccatagagaatcacagtgggaggtcatgcagagattggtgcatagatatagggcagatcttttcgaaaagtcagatatgcaccaaatgggacaacagaatgcgggtagctaaagcagcacaaacgattgtttgctttcaacatgccgtcttgtgccgctttgctccctacatgaggtacattgaaatgaagctgaaagaagtgctgccggctcggttttacattcatagtggcaaaggtttagatgagctcaactcttgggttaaagaaggtaggtttgagggagtgtgcactgagtccgattatgaggcttttgacgcttcgcaggaccagtacatcgtcgcttttgagttggcactgatgaggtaccttaggcttccaaatgacctgattgaggattacaagtacataaagactcacttgggttccaagctggggaattttgcaatcatgcgcttctctggtgaggccagcacttttctattcaacacaatggcaaacatgctcttcaccttcatgcggtatgagcttcatggcgatgagtacatttgctttgctggtgatgacatgtgttcatcaaagagattgcgaatcaagaaaacacatgaaagctttcttggaaagctgaagttgaaggctaaggtgcaacacactgagaagcccacattttgtggctggaatttatgtgctgatggaatatacaagaagccacagctggtctttgagagaatgtgcattgccaaagagctcaacaacctgcacaactgcatcgataattacgcaatcgaagtggctttcgcttacaaacttggggagctggctgttaacaggatggatgaagaggaattgggggccttttacaattgcgttaggctcataacaaaattcaggcatctgctcaaatccaatgtagtggaggtctttaagcgtaaatag

SEQ ID NO: 525 - DNA, 6318 bp, Apple stem grooving virus
  source 1..6318: mol_type = other DNA
atggctttcacttacagaaaccccctcgaaattgcaatcaacaaacttcctagtaagcagtctgatcaactgctttccttgaccaccgacgagattgaaaagaccttagaagtgaccaaccgcttcttctctttttcaatcacaccagaagatcaagaattgttgactaagcatggtctaacacttgcacctatagggtttaagtcacactcccatccaatatccaaaatgatagaaaatcatctcctgtatatatgtgttccgagtcttttatcctcctttaagtcagttgcctttttttcacttagggaaaataaagtagacagttttcttaagatgcattcagtcttttcccatggaaaaattaaatctttggggatgtacaatgctataattgatgggaaagataaatataggtatggtgatgtagagttttcatcttttagggatagagtgattggtcttagagatcaatgccttacacgtaacaaatttccaaaagttctgtttcttcacgacgagttgcactttctaagtccatttgacatggctttcctatttgagacaatcccagaaattgatagagttgttgcaaccacagtttttccaatagaacttttattcggggacaaggtctctaaggaacccagggtttatacctacaaggtccatggctcttcattttcattttatccggatggtgttgcctctgagtgttacgaacagaatttggcaaattctaaatggcccttcacctgcagcggcatacaatgggctaacaggaaaattagggtaaccaagctacagagtctcttcgcccatcatgttttctcatttgacagggggagggcttgtaatgaatttaatcatttcgacaaacctagctgtctacttgcggaagaaatgcgccttttgaccaaaaggtttgataaagcagttattaacagaagcacagtctcttccctcagtacatacatggcttgtcttaaaactgcaaatgcggcttcagctgttgccaagctgaggcagttggagaagagggatctttacccagatgagttgaacttcgtctattcctttggagagcatttcaaaaattttgggatgagagatgactttgatgtgtcagttctacaatgggtcaaagacaaattttgccaggtcatgcctcacttcatcgccgccagtttctttgaaccaacagaatttcatttaaacatgcgcaaattgttgaatgatctggctactaaaggaatagaggttcccctttctgtgatcatcctggacaaagtcaacttcatagagaccagatttcatgccaggatgttcgacatagcacaggcaatcggggtgaacctagatttactggggaaaagatttgattatgaggctgagagtgaagagtacttttcagagaacggttacatctttatgccctctaaatcaaatccagagagaaattggattctaaattccggttcgctgaaaattgactattcaagattggtaagagccaggagatttagattgagaagagatttcctagatcccatatctaaaggaaaatcccctagaaaacaactcttcttggagtcaacgggaaacattaaatcaaatcccaatgctgaaaaaaatagcgagagcggcgaaataaagattgaaggcagtgccgaaaatgatcagccacatgaggtatcacatacttcaatggaaaccgaggatggacagggttttgaaggttcaataccagttgatttaatcaattgctttgaaccagaagaaatcaagcttccaaagagaagaaggaaaaatgattgcgtcttcaaggccatctctgcacacttggggattgactctcaagatttgttgaattttttggtaaatgaagacatatcagatgaattacttgattgcattgaagaggacaaaggactgtcacatgaaatgattgaagaagttttgatcacaaagggtctttcaatggtttatacttctgacttcaaagaaatggcagttcttaatagaaagtatggagtgaatggcaagatgtactgcacaattaaaggcaatcactgcgagctgagttccaaagagtgcttcatcagattattgaaagaaggtggtgaagcgcagatgtcaaatgaaaatctaaatgctgattccttgttcgaccttggaagatttgtgcataatagagacagggctgtcaagctagcaaaatcaatggcaagaggcacaacaggcctcctgaatgaattcgacctagaattctgcaagaacatggtgaccctttcggagttgtttcctgaaaacttttcttctgttgtcgggctaaggcttgggtttgcgggttctggtaaaacgcataaggtgcttcaatggattaattacactccaagtgtcaaaagaatgtttataagtccaaggagaatgctggcggatgaagttgaacctcaactcaagggaacggcctgtcaggtgcatacatgggagactgcacttaaaaaaatcgacggaacttttatggaagtttttgttgatgaaataggtttgtacccacctggataccttacactgctacagatgtgtgctttcagaaagattgttaagggacaaagtgaaaatttcttgaaaggcaaactgttggaattgtcaaagacttgcttaaacataagatgttttggtgatccattgcaattaaggtattactcagctgaagacaccaatctattggacaaaacacatgatattgacctcatgatcaagacgatcaagcacaaatatcttttccaagggtacaggttcggtcagtggtttcaagaactggtgaacatgcccactagagtggatgagtcgaaattctcaaggaagttctttgcagacatttcaagtgtaaaaactgaagattacggactcatcctagttgccaagagagaagataaaggtgtcttcgctggaagagttcctgtagcaacagtgagtgaatctcagggaatgaccattagcaaaagggtgttgatatgtttggaccaaaatctttttgccgggggagccaatgcagccattgttgcaataacaagatcaaaggtcggctttgactttatccttaaagggaattcattgaaagaggtacagaggatggcacaaaagacaatttggcagttcatcattgaagggaagtctattccgatggagaggatagtgaacatgaatcctggagccagcttttatgagagtcctttggatgttggaaattcatcaattcaagacaaagcttctaatgacctgttcataatgccttttataaatttggctgaggaagaagttgacccagaggaagttgttggggacgtaattcaacctgttgagtggttcaaatgtcatgtgcctgtcttcgacacagatccgacgcttgcggagatttttgataaggttgcagcaaaagaaaaaagggaattccagtctgtgctgggtctttcaaatcaatttcttgacatggaaaagaatggatgcaaaatagacatcttgccctttgcgcgacaaaatgtttttccacatcatcaagcgtctgatgatgttactttctgggcaggtgttcaaaaaagaattagaaagtcgaactggagaagggagaaatcgaagtttgaggaatttgaaagccaagggaaagaacttcttcaagaattcatctcaatgctaccgtttgaattcaaagtgaatatcaaggagattgaagatggagagaagagctttttagaaaaaagaaagctaaaatctgagaaaatgtgggcaaatcattcggagagatcagacattgactggaaacttgaccacgcctttctcttcatgaaatcacaatattgcacgaaggaagggaagatgttcaccgaagctaaagctggccaaactttggcctgtttccaacatatagtcctatttagatttggacccatgttgagagcaattgaaagtgcctttttgagaagctgtggagactcatactacatacactccgggaaaaacttcttctgcctggatagctttgtgacaaagaatgcaagtgtctttgatggattttcaattgagtcagactacacggcctttgactcatctcaggaccacgtcatattggcctttgaaatggcactgttacaatacctgggcgtgtcaaaggagtttcagctagattaccttagactgaaattaactctcggatgccgtctcggatcactagcaataatgaggttcacaggagaattttgcactttcttattcaacacatttgccaatatgctgtttactcaattgaagtacaagatagacccaaggaggcataggattttatttgctggggacgatatgtgttccttgagctctctcaaaagaaggagaggggagagagcgacaagattgatgaagagcttttccctaactgcagtagaagaggtgagaaaattcccaatgttttgtggatggtacttaagtccatatggtatcattaaatctccaaaattgctgtgggccaggatcaagatgatgagtgagagacagcttttgaaggaatgtgttgataattacctatttgaggcgatatttgcctacagattaggtgagaggctttacacaattttgaaagaagaggattttgaataccattatcttgtcataagattttttgttagaaattcaaaattgttaacagggttgagcaaaagcttgatatttgaaattggggagggcatcgggtccaaatggctatcgtcaacgtcaaccgcttcctcaaggaggtcgaatctacagacctcaaaattgatgctatctcgtcctcagagctttacaaggatgcaacctttttcaaaccagacgtgcttaattgcatcaaaaggtttgaatcaaacgtcaaggtttcctctcgatctggtgacggcctcgtcctgtctgatttcaaactgcttgatgacaccgaaattgattcaatcaggaagaaaagcaacaagtacaaatacttacactatggagtcatcctggttgggatcaaagcaatgttgccaaactttagaggcatggaagggagagtcattgtatatgatggagcctgcctggatccgaaaagaggccacatttgctcgtatcttttcaagtttgagtctgactgttgctactttggtctcaggccagagcactgtttgtctaccacagacgcaaatttggccaaaaggtttagatttcgtgtggactttgattgtccacaatatgaacaggacactgagttgtttgctcttgacattggagttgcatacagatgcgtcaactctgcaaggtttttggaaaccaaaactggcgattcaggatgggcttcacaggcaatcagcggctgtgaagcacttaaattcaatgaggaaatcaagatggccatcctggatcgcagatccccgctgtttctggaagaaggtgcaccaaacgtgcacattgaaaagagattgttcagaggtgacaaggttagaaggtcacgctcaatttccgctaaaagggggccaaactcaagggtgcaagaaaagagaggatttaggtccctctcggctagaattgaaagatttggaaaaaatgagtttggaagacgtgcttcagcaagcgaggcgccaccgggtaggagtatatctatggaagactcacatagacccggcaaaggaacttctgacggttcctccccctgaaggatttaaggaaggtgaaagctttgagggcaaagagctttaccttcttctttgcaaccattactgtaaatacttgttcggtaatattgctgtctttgggtcatctgataagacccagtttcccgctgttggatttgatacacctccggttcattataatttgacaacgaccccaaaggaaggggagactgacgaaggaaggaaggccagagcgggttcgtctggcgaaaaaacaaaaatttggaggatcgatttgtcaaatgttgttcctgaattgaaaacctttgctgccacttccaggcagaactctttgaacgaatgtacgttcagaaagctttgcgagccatttgccgatttggctcgagaatttctacatgaaaggtggtctaagggattggccaccaatatttacaagaaatggcccaaagctttcgaaaaaagtccatgggtggcctttgattttgccactggtctgaaaatgaatcgtctaacacctgatgagaaacaggtgattgatagaatgaccaaaagactttttcgtactgaaggacaaaaaggggttttcgaggcaggttcggaaagtaacctggaactggagggttag

SEQ ID NO: 526 - DNA, 5889 bp, Citrus leaf blotch virus
  source 1..5889: mol_type = other DNA
atggctttgatgagcaacaaaactgcaattgaatctattttgggtaactttgaaaagaaacacgtcgatgcaatctacaatgccgccgcacaaactatcctctctcactctgaatttaggaataagcattttgcttattcactcaattcttatcaaaagaagatagcctcaaaggtgggtattgaattgtatccaaatggttatttaccacattcccatccattgtcaaaaatttttgagaaccatttgctttttgatgtacttcctggcgtagtaaatactagtagattagttatgtgtagcataaaggagtccaaagttctggtttttaaagggattcgcgacaaatccagaagacaggtttcagacctcaatgccctcaattccttaaataatagtcatacatcattcattaataggttagttgcatccaaagatgtgagtagatatacggaagaagctgatgctttttttcaatccaagaaagggagtccggagctattttcaaggaatttcatcaaaagcttggaaaataaagaggctgttttttttcatgatgaagttcatcactggactaaggcccaaatgttctcatttcttaaaagcacgaaggtcaaaaggttcattttcactgtagtctatccaccagaaattctcaaaaaatttgccaattcccagaacccaaaggtttatgatttcaaagttgataagggtcggctttttttttttccggatggggttaagacagaggcctatgagcagaaattgaatatggagtggctcttttcagcatcacatcttcgcagtggagactgtgtatggactgtaacaagacataagagtatttatgctcatcacctgtttgagatatccattggcgaactagtcacggactcaaaactttttttttccgattataactccattgacatgtctaaaatatttcttgatcgttttcggagttatgaggtattccccatttcgattgagcacctttataaggtctactcttatctgctttgcctcaaaaaacctgacttggagagtggtctagctaaattaaggcaaattattggagatgatgtcgaaatcaaagaattcctcttctttgaacaattttgtaagcgcttaattgaacgccaaacctcttgggggctatttgggcactctttctttgaaaaattaaccgatatggcattgtcatccttgcccaactctatagcccgaatttttcctcaatggaaaaaaaaaaacacatttgagttccttttctcacttgggactcttgttgtggatgtggagagaaaggtgtgttttgaacatgtgcttgaggaatggggatttgaagttgttatcactgatgaaaatgcctatcttgatccactatctatctttgctatcaatgaaaattttaatgaggatagagtggacgatggttatttggaaagaatccgtcttcccttctggaatctgaatgactatgacttgaaaagaaagagggtaaatgcgtataacattctctcttatcgatttgaagaggagcgaaaaattgaatcagcgcaaaaaggtccaaataagatgctccagattgagtggtacgggattaaagaatttaaagttgacccttttatcagcaactccataactgaatttactcttttagaagcattgctgggaaagaggatagatccaaaaaaatactcatattcaaagcaagcctgcactctttccaactatctcacatttttgtgtgctgagggtttggatggattcaatttggaagagcaccttgaacgaaggttgaaagcggccggtcatgacgtttcagatgacgaggaggaagaattgacttcagctgaacaagcggggcctatcaagatattggctgatccacttggttttatgaaagagtgtttggaggagatcccaatcgaaactgaaccatcactggaagaaagagggcagttttccactgattatcattctgagaaatttgaaatcaattacaatgacatttttaatcctcacaattgcatgaacactcacggcgatgaaattcccacaccgtcagatggcaattgttttttttcagcatttactgaaacttttgaagttgaaagacctgacaccttgaggtctgatttctcagactggcttatggaatttaatggggggtcctatgcttcacttgcagaaatgatcagaccgaatggagtttttatggaggcagaactcatatacttgttttgtgtatttagaggagtcacgttgattattcatgatagaactcatgaaaaagagaatgtttatgctgtacaccgcgggtttgaggagggccatatggtacatagaggcaatcattttgtcgggattgaaacttacaatattagtactttaacctcagaccccttacttggtgacatcccatgcggtttttcagaggaaattacaaaattccattttcggcctgatcatttcaactgtgcccagttcagaggaaggaaggcggcttttatcaccaaagttgatgcagattacgggcacaacggtatggtttacccccacaattcatgggtaccttctttagaagagatcattcagatctgtggtcagggagatgatttcaattgtgcattaataaatttctatgaggcaaactcatctcttgggttccatagggataatgaacgggtgtacaatgatgatcctattttgaccgtctgcacattcggtgaaggtagattcaccattgaatttaaggatcaggtaacttcttttctaatgactgctggctctttctttttaatgcctaaagggttccagaagaaggcaagacactctgtctcaaatgaaatgtcgagagtctcgattactttcaggaagcatgttagaaggttgaatgggtcaccgattgccatcagggaagaaaattacaaaaatacatgcctcattaatgccttttcaaaagcaatgaaaaggagcaaacaggcaatcattgcaaaactgaagactgttaatagccctttctggagtagatacctatctgagggtaacggtggctccattgaagattgtcaatcggcctgtgaggcactggatgttactgtcgaccttaatgtaaatggaaaatgtgtggttcttggaaaaggggctttaagaatctcaatggctttaagaaacaaccatttttcagttatcaatgctgcacaactgatggagaggacttttgttagccacttgcttgaaaaaggaaatgtcaatgtgttagaaggatttgacgcaatgctaagtggtgatgtgggcgcagcaggtgttaacaaaattcaatttgcagccaattttgaatttgctagaattttggcaaattcatttctaaatatgacaactggcatctgcctgggcaaggcattggataatggggaaaagtattttctccacattttgaaagatagagtgaaacagattggtatagacgtcacaatggtgtgcggatttgctggatcggggaaaagtcgcaaactgcagtcctggctgcattcaaggaaaaaagggaacttctgtgtggtttccccaagaacaaacttagccgctgactgggcattcaagttagaattagagcccaatgaacagagaaaggtttcaacatttgaaaaattcatcaaaactgataaaagcaaattagatctcatagttattgatgaattgacattgtttccaaatggttacctggatctcctcgtgtatgaattggctgatgtcaataggcattgtcaaatcatccttctgtttgatccattgcaagcaagataccacaacaaaatggatgaatcaatcctgacatttgaacatgacgtggacaggcttattggtggacagaacattgagtacatttacagcacgcatcggatgtccagatacttcaatagattttttgatgtaccttgcttcaatcaggctgatagaacagaggaacaaaggttgtggatatttgatgacgtttactccataccatccatttgctccgaccgtcaggaaccatgtgatgttcttttggttgaatctgaccttgaaaagaaggcattttcacccatcataaatgttatgacatttggtgaatcccagggactcacatttaatcatgtttgtattttgctgtcagagtccagtgcagcttcaaacgaatttagatggatggtggcgctgacgagagcaaggaccaggttttcactctgttcaaccttcttaggtggaattgaagaatttaaagtcaaaaggaaggaaagtctcatcacatccatactccaaggcgagaagatcacattcaacagattaaatctgatgctgaaatgcaatttaattaggagagaaaaagaaaatgggtgcagagatgaggtcgatagggaggaaaggttggagggtgaccctttcctcaaaccatttatcttcttgggacaaagagttgagaaggatgaagatgaggtagaagaagtgaagatcagggaaccaacctgtcaaactcatctgtatataacagagcctaattttggtttgtgctacaatttcgacttcattagggaaaaagaacagcgggaatacagagaggatatgcttgtaactaaccaattctgtgacagttatgataaggttcatataaacggcaaaagagaaacccctggtcccctgcgattcaaagcgatttatccaaagcactcagccgatgatgacatgacgttctggatggccgtcagaaaaaggcttgtatttagagaagaggaggagaattatcaaaggttgtcaagggcgcatttagttgggggtttgctatacaccaacttcaaaaaaaaaatgggcctggaatttacgtttgaccaaggtctactggaggaaagcataaatgcatttgaaaagaaaaagctggaaaaatcatgtggcacaattaaatctcatagcataaggtcggacattgattgggcgctgaatgatgtatttcttttcatgaaaagccagttatgcaccaagtacgaaaaacaatttgttgatgctaaagcgggtcaaactcttgcctgttttcagcacctgattttggtacagttcgctccatggtgtagatacctagaaacccagatcagaaatcagttgcctgaagaaatttacattcactcaaataaaaattttgatgatttgaatgcatgggtcaaaaaatttttccagagggatatctgtgttgagtctgattatgaagcatttgatgcaagccaggatgaatacatattatccttcgagattcatctgatgaaagatgcgcattttccgcagaaaatcattgatgcatacatagaccttaaatgcaaattgggatgcaaattgggccatttttcaataatgagatttacaggggaattttgcaccttcctattcaacacactggccaatatggcattcactatgtgtagatacgaatggaggagaggacaaccaattgcattcgcaggagatgatatgtgtgcattaaacaatttggctgtttgtcatgatttcgatgacctttttgaactcatcagcctaaaagctaaggtggaaaggacagaaaccccaatgttttgtggatggagactaactccatatgggattgtgaaggagcctgaattagtctataatcgctttcaagtggccattgaagagggaaaggtcttggagtgtctggaaaattatgcaatcgaggtttcttatgcctacagtttaagtgagaggctgtatgaagttttgaaaagtgaaaggcaagttcagtatcatcaagctgtggttagatttatagtcacgcacattgacaaactcaaaacaaaagtgagggaccttttcttagaacaatcttccgacgaagatatctga

SEQ ID NO: 527 - DNA, 2127 bp, Apple latent spherical virus
  source 1..2127: mol_type = other DNA
ggacccgagcaaatgtatataccaactgctcgatctgaatcctttggatcagtctgtcttcttgggaaatggactggccctaagccttattttttagagaatagttctttaactccctctctaattcatgactgtatagatatagacatgacaacggagcctgctattctttctaagaaagatcccagacttcaatacactaacaataaagattttgatccttttctctcaggtatgggaaagtatgctgttgaggctcactcctttgatgaagatgaagaattgtttgaggatgctctagatcgagttttctcagagatacctatgtttacctgtgaagatttatctaatgatcaggtatgcaatggtatagaggacgatgattatgctgaaggattggttatgcagactgctgaaggttaccccttctgcactatgcggcccccaggagtcacaggaaagacgtggctttttgcgggatcaccaggtgattggcacatagtccccaattctcttcttgctaacgaacttaatgtcaaagagttgaaccttagcaagaatatttttgaaccagtgataggtatagattttcccaaggatgagaaagttgattcttctaaagtgtacataaaacaaaaaactcgactttttactatcctacctgttgattataatattttagttaggaaatattttctttcttttgtttcacaacttatggccctccataatgaagttcctacaaaggtaggtattgatccaatttctaatgaatggtctattctttgtcattctcttcactcaaaaggaaccaattggttcaacggagattattccagatttgatggaataacacctcgtaatgtgcttcagggcattgtgaagagaatttcgcgtagatatgctaacaagagttcttttgctataacagatcctacactttctatcaatggtgatcttgctagatcccttttgatggatatgtgtagcactcgatatgggctaactaatggggacctttggtatgtcacttctggtataccttcaggatttcccttaaccgttatagttaattctttagttaattctttctttgtgcactttgcttatatgaagcttcattcttctgaagtgcacaaggctttgtatcctctttattcttttagaacccttgtatcatatgctgtttatggggatgataatctaatttctgtacatgacacaattaaagatacttttaatttagttactatatctaacttattgttggagcatggtgtgactcttaagaatggagccgataaaaatgaggaaattttatctccattctatcctatagagaaggtggattttctcaagagacgattcaccactttacaaggacatattgttgctccacttaacactgttaatataactgagcgcttgcactgggttcgtaagggcctaggtgatgctgatgccacacttgagaactgtaaatcagctctctttgaagctttatttcatggagagctgtattacaatgatcttcgaggcaaaattgaaaaagcttgtaaagtgaagggccttcctttgatagtcccagattaccaagacgctctttctttatttttaactggaggctcatatgctaaggctattcaggctatagcgatgaatctccctgatagaatctctctgtacaaatctgaattctatagtgtacaaatatatcctcaaattttttatgtgaccaatgagagaaatgtcacacttcagaaattgctggagaccactactctccgtaacatttgttatgtttctaggaactacgagtctaggagcagttctaggggtcttttcactcttaagggtgaaggttggactccagctgctttgaaagctcgtcttagtgtgtacaaagctatggccaaacctgtttacttcgtagatgaggctaatgatggtttggctatgttttattgcttagattatgcttttcgtgtttgtggtttaacccggagtcaaattgcaaaaattcttaatgcagtttttggtggtaaccccgaagtctgccaaagaattttccaatttttctctcaagtcgagccaaccaataagtacattcctcccaatcaaaggagg

SEQ ID NO: 528 - DNA, 6588 bp, Soybean latent spherical virus
  source 1..6588: mol_type = other DNA
atgtctttccattgtccaagttctacttgccttggttacactcaatctttctctcgccgtgatatgcgagagcaaggggatcgttgtccccatgctatgtgtggtgctcttctagtgaagaaggtgcccactttatccccacagggtgccagacctgtggtatcaaagaccactgttgtggtccctcctcaagccactgaggaggttttgtattatgggtgtgcccccagacccgcttttcttgaagcggttttggcggccccaaaattaaagatggctccaccagtggtggatgcgatggaagtcgcatacctccgtggtgttgcagccatggaagctgaggagaagaaactcctcaggaaagaaaaggctgcagttgtggcccgtgctaaggcacggcgagctgcaaggaaggcagccaagaagcaagttgccgagatgaaggcaactgtggccctgaaattggccacaaggcaaaaaactgcacgtttgagtgcagctaagagggccatgaaggccaaaagaaaggcagccaaggaggctgccaggttggcgcttgaagagcgccgtgctgcgggtttaacccgcaaatcggccttcaggcgtagcctgaaaaagaaagccactaagatggctggtaggaaggtccctaagacctccacttccacctttcccaaggtggaatctttttcttgttttccttcttctcccctccctgcttttattagggaggaacagccctgggtggctgtgaataccccctgccctcatcctgagggcttcgatttggcggttgatcccgcctttgtggctcctattgtggggccaatcgttagtgtgccatttatggcacctgttgtgaaggcttttaatagccttgtagaaattttggcggctatcaattatgaggccgctgtagatttaagagcctacattttagaaatagcttcttacgaaaatttctttgctttacggagaatttttgttggaaaagctttatcttggatggctcttatcctacctctttatccctatgcgggcatctttgatacttatctcccacttgatatggtggaagataagaattgtgatgcttatttagcctcattacagcagactgcagtgatggtgctggaagtgacccagggaccaatggacgcacattctatctttgatatagtgcgttccgttggttctaaggttgctagcataaaggacaaggtagtgggatgtatagttgagaaatctgctgccctgttggacactgttatagacacagcaaagggcatgttttttggagttcttggcccataccttgcccgcgcacagaagatcggagaggaaattaaaaaattctgggataactgtgtcgagtgggcaacaaaattgtggcaaggagctcatatagcattacaagctcttggcatttatgctgtttgggctatagttgctatggtgcttgtaggagtaatgtatatattagaaacaattttgatttgtttaggtgtaatgagtggtcatggtgtccttgttgttgctttgacaggggcagtcatgacttttttaggttttactgtttttcagatggggcgtgagtatatacattttttgaccgccctacgtcaaatcattttcttagcagttattccccaaggaggattgactcaagttaatatcatggattcgtccgttgatgttactgagccacactccttgttagatactgctatggcaccagttcattttttggaaactgttgccagtggtttaacattcttttcttctacctctgttacagtcttaggtaaattaggaaattctctggagggaattcgcaaaggttttaattgcctacgcgattttacttccgttttgttagaacaatttggaaatgcttttgaatacatttccggtaagagaacgtctttcttccgtgatcttgcgtgtgcagttaaagtagatatcgctcgatggacccaggatgcacgggaaaccattgagtattttgaaatttcaggttcccttgataggtatgagtattatcgtgctcgtgagcttatctatcaaggtcaagatttgatcgacaccgccaacaaagctcgtagttcgcacacaagtgtaaaattcttgcgaactattggcaagttggttgaggaactaaaagaaattcgtgctaagtgtgcacgaagtttaaaattcccaggatggcgtcgacagcctttttgggtatattgttttggtgagagtcaatgtggcaaatctactttggcaaattatttgatgccattgttgatgtctcacatgggttgggatcctcaggatgtttacagcaaggatcccgttgatggttactggtccggatattatcagcagaagggtttaaagataaatgatttatctgctgttaattccaaagatgtagcgcccctcgagcagcagttgataccattgatatccactgaggagaaaatggtgtcttcggctgaaattgaaggaaaaggaatgcagtttgcctctgaaattgtagtttcttcatccaattttaatgatgcaccaactggtgctgaaattttggatgcagatgcttacagacagagacgaaaggttttgatgcgctgcagaagggctgctgagtgggttcataatgctgatggtacgcgcacagagaagcttgatgctgagggcaaaattgtatataagccctatgatccatccaatgctttatcttgtaccgaggtgcaatggattcatcctgtttcatttacagctcttcccggaccctgtgggcagtggcacttagccgagttcaccatacctatggtgaaggaggctatggatgcccactttttgcaagaagaaacaaagatggcatcctggaagtcgagccttggcatgaagagtcaaacagcaaggaaaatgggttcatacttgcaggatatgattaagggtattggtaattttgttacccttaaaggagcaaaagattcagatcctcgttatttgctggtagctgttgatggaaaatgctatgcgttagaccagcaagggaaagccactccttatgaggattgtgatgttgttgaagaaattgagcggctaactttgttgcaataccgctcttatttcgcggacttggtaatggaacatgctgacaatacatattatcaagattcattccattcatcaacagtccgagattttttgttggctctaatgaaagatgggtcaactgttttgtctgtggatagtctgggtagtagtactcaggacattcacaaagaattatgggcagaattgggactttcagaaaagatttttctgagggtttcacaaatagctcgtaatcaattgcgcgatgctccacattttaaggaagacgttgcgcacaattttttggaaactatgaggcatcttagggatgctattgtagatagaaaggaacaaattcttttattttttgcagcagtagctttagtgggcttgtttagttggggttttttgagcctaattaaacaatttgcttgtggttctttaggatttggtgctggcatcgcattgcgtgagcaaattgctcatagtagtgttatgtcttcaggtagtgtgactagtgcctttgttgcacgcaacatgccagttgtatggggcaaagctgctaggtatgccactgcacactcaagcaaagaagaagtgggcgccaattttgattattttgaagatgctagtgctcatttgttagctcgtgttgttggctcatctggtcagtctgagacctgccttttatttggtcatcaggctattgcactttgtgcgcaccagttgagattgtttcctgacaatgacagggtgactatccattatttttcaaaggagaggcgccctgtttgtttttcatttacttggcattatattaatgctattgagtggcctgactgtgaagtaattgtatatagagatgcacagctcacgccactccctgtatatagtgatgataattatttgtgtggggagcaaacattgcccacagttttaacgataactgggctctcaattaagaagaagaaattctttgatgattccacgttgtgcccaagcgaaaaaattctggacggtgaaatgcccatcgtccggagctggaaagataccgcttctctgagaacgcaagtccagacaattttgtccgagactcatagaagagatataaataggtattatacttctagttacccatcagggaaacatgatagtggaggtataataactgcagttataaatgggaagcgtaaagtgataggcatgcactgtgcgggggcgcaaaatgggaaaatttatgttagtaccattggtcttttgcccacccgcaacattaatgatgcacactctgctgccgattattttgttccaagtattggcagggaggaaaaaggattttgcaagattggttggattgcagatccttcaaagagaccacatgctgccactaagactgcattggcaccagttcctaaggaattggctttgccattgccagagggagtgtctgtaaagattccttctattttaagtgcagcagatccacgcctgcgtgatgaggtgaatcctgaatttaaggattatgatcctctacgcgtaggtatggataaatttgccaaccccatggatccgcttgatgatgaagttttacagcgggtctgtgaagatatttatgaaacctggtatgactgtttaccaatactagatgatgagaaggtcttcttgcaaaagacctccttggaggtggcgttgaacggtataccgggtgaggcttgctatgaagccatgaggttggatacatctgagggttatccttttgttttagaaaggaaaccaggggagagcggcaaactcagttatgtacatattgatgagaatggcgttcgttcccttattcctggtacatcggtttttagagattaccatgaattgtcagcaagtatactgacccaagtgcctgtgttgaattgcattgaatgtcctaaagatgagttgctaaaaccatctaaagttttggagaaaccaggcacacggcttttcgatgtactcccctttacacataatattcttttgagggagtattttttaaatttttgtgtttttctccaacaaaatagggtgcatttgccctgttctgttggtgttaatccatattctcgcgagtggacctggctttttgataggttggctgcgaagagtgataaagctttgaattgtgattatagtaaatttgatgggcttatatcacatcaagtctacatgcacatggttgcaaccattaaccgactctttagagatggtgaggaagcaaattgtgcgcgtaagaacttgtttttaatgtttacatcacgcaggagcatctgctatgatcaggtttatatggtcaaaggtggaatgccttctggatgcgcactcactgtaattattaattcaattttgaatgaaattttagtgcgctatgtctatagaataaccgtcccaatgccagccaaaaactattttaataaatacgttgaattggtggtatatggtgatgataatttaattgccatacatgatgatgtggtctctttttttgatgggcccattattaaggaaaaattggcagaggttggggtgaccattacggatggtactgataaatcatcacccaccttgttacgcaaaccgctggagtctcttgattttttgaagaggggctttaggaaaattgaagggggaatgtattcttgccctctggataaagggtccctttactcccggttatattacagtgctggaggtaaagggggcctttttcaacttgatatcctccacgataatgttaaatctttcttggaggaactgacgcatcatgctgatcattatgaagagtttcaaagagtgcgcagtttttatattaagcgtattccttcatggtcagctacgctgcctacctatgctacatgtctgaatatgatggaggggcagcggaattcagcaacaccctggcaaccacataaatttatagaaacgcggccttcaggttgcgaaactaaaatgatggcgggccaggataatcatgctcagaagatatgtgtaactgagcgtataattatatgtggtgaaaaatatacgccaccaatactggagacctcttttgttgtttcaatagacaaccccctttatattggtgaaaggggggagtatgttaaaacagagtttggttcaggtatggggcgactgcctactgatgcctggatcaaagctttctccagtcccaagaagcacccacagctttttgaagcttataagatgggtgctactatatattttagatcctgcatgccctatttaaatgcatggtgtgcagtgtgtaagtttgcattggctcatggaatcgatcagagttctattattgctatgtatgagtcatgcaaaccaagaggggcgggcgacattgctcctcttgtggccgtaaaggcatacactaaatttgtgaacagaccagtgtttaaatttaaagagactgttcataaggaagtgctcgaagcacacaatagtgtgcgagtcgcctaa

SEQ ID NO: 529 - DNA, 1083 bp, Arabidopsis thaliana
  source 1..1083: mol_type = other DNA
atggctactgggcaggttctgtttcagcgattctattgcaagaagtctttggctaaatttgatgtcaagatagttgctgccagctgtgtatggcttgcatcaaaactggaagaaaaccctaaaaaagctagacaggtcatcatcgtattccacaggatggagtgtcgcagggagaacttgccattagaacatctggatatgtatgccaagaagttctctgagttgaaagttgaattaagcagaactgagagacatatactgaaagagatgggttttgtttgtcatgttgaacatcctcacaagttcatatcaaactaccttgccacattagaaacacctccagaattgaggcaagaagcttggaatttggccaatgatagtctgcgtacaaccctctgtgtaaggttcagaagtgaggttgtggcttgtggggtagtgtatgctgctgctcgtaggtttcaagtaccactccctgagaatccgccgtggtggaaagcatttgatgcagataaatctagtattgacgaagtgtgtagagttcttgctcatttatacagtcttccaaaggctcagtatatctctgtttgcaaggatgggaagccatttacattttctagcaggtccgggaattctcaaggtcaatcagcgacaaaggatctgttgccgggagcaggcgaggctgttgatactaaatgtactgcaggatcagctaataacgacttgaaggatggaatggttactacaccacacgaaaaggctacagattccaagaaaagtggtaccgagtcaaactctcagccaattgtaggagactcaagctatgaaagaagtaaagtaggagatagagaaagagagagtgatagagagaaggaacgaggtagagagagggacaggggtaggtctcacagaggcagagattctgacagagacagtgatagggagagagacaaactcaaagatcgaagtcatcatcggtcaagagacagattgaaggattcaggtggacattcagataaatcaaggcatcattcttctcgggaccgtgactaccgcgactcatcgaaagaccgtcgtaggcaccat

SEQ ID NO: 530 - DNA, 2586 bp, Solanum lycopersicum
  source 1..2586: mol_type = other DNA
atggctgaaattcttcttacatcagtaatcaataaatctgtagaaatagctggaaatttactgattcaagaaggaaagcgtttatattggttgaaagaggatatcgattggctccagagagaaatgagacacattcgatcttatgttgacaacgcaaaggccaaggaagctggaggtgattcaagggtcaaaaacttattgaaagatattcaagaattggcaggtgatgtggaggatctcttagatgacttccttccaaaaattcaacaatccaataagttcaattattgccttaagaggagttcttttgcagatgagtttgctatggagattgagaagataaagagaagggttgttgacattgaccgaataaggaaaacttacaacatcatagatacagataacaataatgatgattgtgttctgctggatcggagaagattattcctacatgctgatgaaacagagatcatcggtttggatgatgacttcaatatgctacaagccaaattacttaatcaagatttgcattatggagttgtttccatagttggcatgcccggtctggggaaaacaactcttgccaagaaactttataggctcattcgtgatcaatttgagtgttctggactggtctacgtttcacaacagccaagagcgagtgaaatcttacttgacattgccaaacaaattggactgacggaacagaaaatgaaggaaaatttggaggacaacctgcgatcactcttgaaaataaaaaggtatgttatcctcctagatgacatttgggatgtggaaatttgggatgatctgaaacttgtccttcctgaatgtgattcaaaagtcggcagtagaatgataatcacgtctcgaaatagtaatgtaggcagatacataggaggggaatcctccctccatgcattgcaacccctagaatccgagaaaagctttgaactctttaccaagaaaatctttaattttgatgataataatagttgggccaatgcttcacctgacttggtgaatattggtagaaatatagttgggagatgtggaggtataccgctagccatagtggtgactgcaggcatgttaagggcaagagaaagaacagaacatgcgtggaacagagtacttgagagtatgggccataaagttcaagatggatgtgctaaggtattggctctcagttacaatgatttacctattgcctcaaggccatgtttcttgtactttggcctttaccccgaggaccatgaaattcgtgcttttgatttgataaatatgtggattgctgagaagtttatagtagtaaatagtggtaataggcgagaggctgaggatttggcggaggacgtcctaaatgatttggtttctagaaacttgattcaacttgccaaaaggacatataatggaagaatttcaagttgtcgcatacatgacttgttacatagtttgtgtgtggacttggctaaggaaagtaacttctttcacaccgcgcatgatgcatttggtgatcccggcaatgttgctaggctccgaaggattacattctactctgacaatgtcatgattgagttcttccgttcaaatcctaagcttgagaagcttcgtgtacttttctgtttcgcaaaagacccttccatattttctcatatggcttattttgacttcaaattgttgcacacattggttgtagtcatgtctcaaagttttcaagcatatgtcactatcccaagcaaatttgggaacatgacttgcttacgctatctgagattggaggggaatatttgtggaaaactgccaaatagtattgtcaagctcacacgtctagagaccatagacattgatcgacgtagcctcattcaacctccttctggtgtttgggagtctaaacatttgagacatctttgttatagagattatggacaagcatgtaacagttgcttttctataagctcattttacccaaatatttactcattgcatcctaacaatctacaaaccttgatgtggatacctgataaattttttgaaccgaggttgttgcaccgattgatcaatttaagaaaactgggtatactgggagtgtccaattctaccgttaagatgttatcaatatttagccctgtgcttaaggcgctggaggttctgaagctcagtttttccagtgacccgagtgaacaaataaagttgtcatcgtatccacatattgctaagttgcatttgaatgttaacagaacaatggccttgaactctcaatcatttcctccaaatctcatcaagcttactctagcctactttagtgtagaccgttatatactggcagtacttaagacatttcccaaattaagaaaacttaaaatgttcatctgcaagtataatgaagaaaagatggatctctcgggcgaggcaaatggttatagctttccgcaacttgaagttttgcatattcatagcccgaatgggttgtctgaagtaacgtgcacggatgatgtcagtatgcccaaattgaaaaagctgttacttacaggattccattgccgaatcagtttatcggaacggcttaaaaagctgagtaaatga

SEQ ID NO: 531 - DNA, 3156 bp, Solanum tuberosum
  source 1..3156: mol_type = other DNA
atggcttatgctgctgttacttcccttatgagaaccatacatcaatcaatggaacttactggatgtgatttgcaaccgttttatgaaaagctcaaatctttgagagctattctggagaaatcctgcaatataatgggcgatcatgaggggttaacaatcttggaagttgaaatcgtagaggtagcatacacaacagaagatatggttgactcggaatcaagaaatgtttttttagcacagaatttggaggaaagaagcagggctatgtgggagatttttttcgtcctggaacaagcactagaatgcattgattccaccgtgaaacagtggatggcaacatcggacagcatgaaagatctaaaaccacaaactagctcgcttgtcagtttacctgaacatgatgttgagcagcccgagaatataatggttggccgtgaaaatgaatttgagatgatgctggatcaacttgctagaggaggaagggaactagaagttgtctcaatcgtagggatgggaggcatcgggaaaacaactttggctacaaaactctatagtgatccgtgcattatgtctcgatttgatattcgtgcaaaagcaactgtttcacaagagtattgtgtgagaaatgtactcctaggccttctttctttgacaagtgatgaacctgatgatcagctagcggaccgactgcaaaagcatctgaaaggcaggagatacttggtagtcattgatgacatatggactacagaagcttgggatgatataaaactatgtttcccagactgttataatggaagcagaatactcctgactactcggaatgtggaagtggctgaatatgctagttcaggtaagcctcctcatcacatgcgcctcatgaattttgacgaaagttggaatttactacacaaaaagatctttgaaaaagaaggttcttattctcctgaatttgaaaatattgggaaacaaattgcattaaaatgtggaggattacctctagcaattactgtgattgctggacttctctccaaaatgggtcaaagattagatgagtggcaaagaattggggaaaatgtaagttcggtcgttagcacagatcctgaagcacaatgcatgagagtgttggctttgagttaccatcacttgccttctcacctaaaaccgtgttttctgtattttgcaattttcacagaggatgaacagatttctgtaaatgaacttgttgagttatggcctgtagagggatttttgaatgaagaagagggaaaaagcatagaagaggtggcaacaacatgtataaacgaacttatagatagaagcttaattttcatccacaattttagttttcgtggaacaatagaaagttgtggaatgcatgatgtgacccgtgaactctgtttgagggaagctcgaaacatgaattttgtgaatgttatcagaggaaagagtgatcaaaattcatgtgcacaatccatgcagcgttcctttaagagtcgaagtcggatcagaatccataaggtggaagaattggcttggtgtcgtaacagtgaggctcattctattatcatgttgggtggattcgaatgcgtcacactggaattgtctttcaagctagtaagagtactagatcttggtttgaatacatggccaatttttcccagtggagtactttctctaattcatttgagatacctatctttgcgttttaatccttgcttacagcagtatcaaggatcgaaagaagctgttccctcatcaataatagacattcctctatcgatatcaagcctatgctatctgcaaacttttaaacttaaccttccatttcccagttattatcctttcatattaccatcggaaattttgacgatgccacaattgaggacgctgtgtatgggctggaattacttgcggagtcatgagcctacagagaacagattggttttgaaaaatttgcaatgcctcaatcaattgaaccctcggtattgtacagggtctttttttagactatttcccaatttaaagaagttgcaagtatttggcgtcccagaagactttcgcaatagccaggacctgtatgattttcgctacttatatcagctcgaagaattgacatttcgtttatattatccatatgctgcttgctttctaaaaaacactgcaccttcaggttctacgcaagatcctctgaggtttcagacggaaatattgcacaaagagattgatttcgggggaactgcacctccaactttactcttacctcctccggatgcttttccacaaaaccttaagagtttaacttttaggggagaattctctgtggcatggaaggatttgagcattgttggtaaattacccaaactcgaggtccttatactatcatggaatgccttcataggcaaggagtgggaagtagttgaggaagggtttcctcacttgaagttcttgtttctggatgatgtatacattcgatactggagagctagtagtgatcactttccgtaccttgaacgagttattcttagagattgccgtaatttggattcaatccctcgagattttgcagatataaccacactagctcttattgatatagattactgtcaacaatctgttgtgaattccgccaagcaaattcaacaggacattcaagacaactatggaagctctatcgaggtccatactcgtcatcttttgtaagacatcttcttccttgctttacaacaataattaactcatcatcatagtaaactcgataataatctggataatagccttagtaagtcaaattgcaccaattcaacaaaagttcttgatgctgtcattgtgtttgatttgaatccttccaatattgtgtaacttgttatacttgcatgttcattcttgattttgggaagtgtaacatttcatttttcatcttttgtggctagcattcccaagagtgtgacaacagttgaagatgatgatgatagtgtgacaacagatgaagatgatgatgatgatgactttgagaaagaagttgcttcttgccgcaataatgtgtaagttcttatacctgcatgctcattcttgctataatgttctcttgttccttaattatgggacatctgacatattattttccatgttttgcgtcttttatttttctgcagcgag

SEQ ID NO: 532 - DNA, 480 bp, Tobacco mosaic virus
  source 1..480: mol_type = other DNA
atgtcttacagtatcactactccatctcagttcgtgttcttgtcatcagcgtgggccgacccaatagagttaattaatttatgtactaatgccttaggaaatcagtttcaaacacaacaagctcgaactgtcgttcaaagacaattcagtgaggtgtggaaaccttcaccacaagtaactgttaggttccctgacagtgactttaaggtgtacaggtacaatgcggtattagacccgctagtcacagcactgttaggtgcattcgacactagaaatagaataatagaagttgaaaatcaggcgaaccccacgactgccgaaacgttagatgctactcgtagagtagacgacgcaacggtggccataaggagcgcgataaataatttaatagtagaattgatcagaggaaccggatcttataatcggagctctttcgagagctcttctggtttggtttggacctctggtcctgcaacttga

SEQ ID NO: 533 - DNA, 795 bp, Soybean mosaic virus
  source 1..795: mol_type = other DNA
tcaggcaaggagaaggaaggagacatggatgcaggtaaggatccaaagaagaataccagcagtagcaaaggagctggtacaagcagcaaagatgtaaatgttggatcaaaaggaaaggtggttccgcgtttgcagaagattacaaggaagatgaatcttccaatggttgaagggaagatcattcttagcttggaccacttgcttgagtacaaacctaatcaggttgatttattcaatactcgagcaacaagaacacagtttgaagcgtggtacaatgcagttaaagatgaatatgagcttgatgatgagcagatgggtgtggtcatgaatggtttcatggtttggtgtattgacaatggcacttctccagatgccaatggcgtgtgggtgatgatggatggagaggaacagattgaatatccgctgaagccaattgtcgaaaatgcaaaaccaactttgagacaaatcatgcatcatttttcagatgcagcagaagcttacattgagatgagaaattctgaaagtccgtatatgcctagatatggactgttaaggaatttgagagatagagagctagcccgctatgcttttgacttctatgaggtcacttctaaaacaccaaacagggcaagggaagcaatagcgcaaatgaaggctgcagctctctcgggagttaacaacaagttgtttggacttgatggaaatatctcaaccaactccgaaaatactgaaaggcacactgcaagggatgtgaatcaaaacatgcacactcttctgggcatgggcccaccgcag

SEQ ID NO: 534 - DNA, 654 bp, Cucumber mosaic virus
  source 1..654: mol_type = other DNA
atggacaaatctgaatcaaccagtgccggtcgtaatcgtcgacgtcgtctgcgtcgcggttcccgctccgcctcctcctccgcggatgctacatttagagtcctgtcgcaacagctttcgcgacttaataagacgttagcagctggtcgtcctactattaaccacccaacctttgtgggtagtgagcgttgtaaacctggatacacgttcacctcgattaccctgaagccaccgaaaatagacaaggggtcttattatggcaaaaggttgttacttcctgattcagtcactgagttcgataagaagcttgtttcgcgcattcaaattcgagttaatcctttgccgaaatttgattctaccgtgtgggtgacggtccgtaaagttcctgcctcctcggacctgtctgtatccgccatctctgctatgtttgcggacggagcctcaccggtactggtttatcagtatgctgcatctggcgttcaagccaataacaaattgttatatgatctttcagtgatgcgcgctgatattggtgacatgagaaagtacgccgtgctcgtgtattcaaaagacgatgcgcttgagacggacgaactagtacttcatatcgacatcgagcaccaacgcattcccacgtctggggtgctcccagtt

SEQ ID NO: 535 - DNA, 708 bp, Potato virus X
  source 1..708: mol_type = other DNA
atgactacaccagccaacaccactcaagctgtaggatccaccaaatcaactaccaccaccactgcaggcgcaactcctgccaattcagggctattcaccataccagatggggacttcttcagcaccgcaaaggctgtggtcgctagcaatgccgtggccaccaacgaggatctcgccaaaatacaggaaatctggaaggacaagaaaattccttcagacactatggctcaggcagcttgggacttagtgagacactgtgccgacgtcgggtcctctgcccaaactgaaatgataggcaccggtccatactccaatggggtcagccgggctagactggcagctgcaattaaagaggtgtgcacactgaggcagttctgcaaaaagtatgcccccgtggtctggaactggatgctcacaaacaacagcccaccggccaactggcaggcacaaggcttcaagccggagcacaaattcgcagcctttgacttctttgatggagtcactaatcccgcagctatcactcccaaagaggggctcatgagacctccgtctgaagcagaaatgaatgccgcccaaactgctgcctttgtgaagatcaccaaggcgagggcgcaatccaacgactttgccagtctggatgccgcggtcactaggggccgcatcacaggaacgactgttgcagaagcagttgtttcactacccccacca

SEQ ID NO: 536 - DNA, 774 bp, Tomato spotted wilt virus
  source 1..774: mol_type = other DNA
atgtctaaggttaagctcactaaggaaagcattgttgctttgttgacacaaggcaaagaccttgagtttgaggaagatcagaatctggtagcattcaacttcaagactttttgtctggaaaacatcgaccagatcaagaagatgagcgttatttcatgtctgacattcctaaagaatcgtcagagcataatgaaggttattaagcaaagcgattttacttttggtaaaattaccataaagaaaacttcagacaggattggaggcactgacatgaccttcagaaggcttgatagcttgatcagggtcaggcttgttgaagaaactgggaattctgagaatctcaatactatcaaatctaagattgcttcccatcctttgattcaagcctatggattacctctcgatgatgcaaagtctgtgagacttgccataatgctgggaggtagcttacctcttattgcttcagttgatagctttgagatgatcagtgttgtcttggctatatatcaggatgcaaaatacaaggacctcgggatcgacccaaagaagtatgacaccaaggaagccttaggaaaagtttgcactgtgctgaaaagcaaagcatttgaaatgaatgaagatcaggtgaagaaggggaaagagtatgctgctatacttagctccagcaatcctaatgctaaagggagtgttgctatggaacattacagtgaaactcttaacaagttctatgaaatgttcggggttaaaaagcaggcaaaactcgcagaacttgct

SEQ ID NO: 537 - DNA, 777 bp, Glycine max
  source 1..777: mol_type = other DNA
atgagtggtagcaacgatggtagcggcagctggagctctaggtttttgaaggtggctagtgcagctgccgctacagccgccgttgccggcggtttatatgccattctttcatcctcaacctctgctagctctgagatggaagtgccgtttggcagcgcacggcctgagagcaacactaagcgacaacaagagtcattctatgagcacgaagaaactgaggatgacgaagaatctgaggaggcagacaatgggaaatggaagaaacctgagagtggttgggtgaagctgaatgtggatggttcacgtattcatgaagaacccgcctctgcgggttgtggtggggttataagggacgaatggggaacatggtgcgtgggctttgatcagaaattggaccccaacatttgtcgacaagcccattatacagagttacaagctattctaacgggcctgaaggtggctcgggaggacatgatcaatgtggaaaaactggttgtggagtcagacagtgagcccgcggtgaacatggtgaagagtgggcttgggtacaagtatcatcgtccagagtataaggttgttcaagacataaataggcttcttaaagatcctaagtggctagcgaggttggattatgttcctaggaaagctaatcgagtcgctaattacctcgccaagcgtgtttgtaaaccgtcttctcctcatgatcatcatcatttcagcaagtatccttgtcccccggattacgattgtgaaaagattttcttggaggataacaat

SEQ ID NO: 538 - protein, 361 aa, Arabidopsis thaliana
MATGQVLFQRFYCKKSLAKFDVKIVAASCVWLASKLEENPKKARQVIIVFHRMECRRENLPLEHLDMYAKKFSELKVELSRTERHILKEMGFVCHVEHPHKFISNYLATLETPPELRQEAWNLANDSLRTTLCVRFRSEVVACGVVYAAARRFQVPLPENPPWWKAFDADKSSIDEVCRVLAHLYSLPKAQYISVCKDGKPFTFSSRSGNSQGQSATKDLLPGAGEAVDTKCTAGSANNDLKDGMVTTPHEKATDSKKSGTESNSQPIVGDSSYERSKVGDRERESDREKERGRERDRGRSHRGRDSDRDSDRERDKLKDRSHHRSRDRLKDSGGHSDKSRHHSSRDRDYRDSSKDRRRHH

SEQ ID NO: 539 - protein, 1246 aa, Solanum peruvianum
MAENEIEEMLEHLRRIKSGGDLDWLDILRIEELEMVLRVFRTFTKYNDVLLPDSLVELTKRAKLIGEILHRLFGRIPHKCKTNLNLERLESHLLEFFQGNTASLSHNYELNNFDLSKYMDCLENFLNDVLMMFLQKDRFFHSREQLAKHRSIKELKIVQKKIRFLKYIYAPEINGYVDYEKQECLENRIQFMTNTVGQYCLAVLDYVTEGKLNEENDNFSKPPYLLSLIVLVELEMKKIFHGEVKASKFTQSKTFKDKKLPKGFSHHLHNLLMYLRNKKLENFPNNIAAQNIDVAIEFLLVFLDADVSNHVINGNWLKEVLLKVGAIAGDILYVIQKLLPRSINKDETSNISLCSIQILEKTKDLKAQVETYYKSLKFTPSQFPTFGGLSFLNSLLRKLNEMSTSKSGLGFLMKPLLGNLEKELSSLTSILEKELSSIFRDVVHHEHNIPKDLQRRTINLSYEAEVAIDSILAQYNAFLHIFCSLPTIVKEIKQINAEVTEMWSADIPLNPHYVAAPLKHLPDRHSNLVTDEEVVGFENKAEELIDYLIRGTNELDVVPIVGMGGQGKTTIARKLYNNDIIVSRFDVRAWCIISQTYNRRELLQDIFSQVTGSDDNGATVDVLADMLRRKLMGKRYLIVLDDMWDCMVWDDLRLSFPDDGIRSRIVVTTRLEEVGKQVKYHTDPYSLPFLTTEESCQLLQKKVFQKEDCPPELQDVSQAVAEKCKGLPLVVVLVAGIIKKRKMEESWWNEVKDALFDYLDSEFEEYSLATMQLSFDNLPHCLKPCLLYMGMFSEDARIPASTLISLWIAEGFVENTESGRLMEEEAEGYLMDLISSNLVMLSKRTYKGRVKYCQVHDVVHHFCLEKSREAKFMLAVKGQYIHFQPSDWKGTRVSFSFSEELSKFASLVSKTQKPFHQHLRSLITTNRAKSINDIFSCQISELRLLKVLDLSSYIVEFLSLATFKPLNQLKYLAVQAFEFYFDPGSHLPHIETFIVMNLPYYDILLPVSFWEMKKLRHAHFGKAEFDKQGLSEGSSKLENLRILKNIVGFDRVDVLSRRCPNLQQLQITYFGNNEEPFCPKLENLTQLQQLQLSFARPRTLSGLQLPSNLNKLVLEGIHIGCVIPFIAGLPSLEYLQLHDVCFPQSEEWCLGDITFHKLKLLKLVKLNISRWDVSEESFPLLETLVIKKCIDLEEIPLSFADIPTLEQIKLIGSWKVSLEDSAVRMKEEIKDTEGCDRLHLVKQRSD

SEQ ID NO: 540 - protein, 861 aa, Solanum lycopersicum
MAEILLTSVINKSVEIAGNLLIQEGKRLYWLKEDIDWLQREMRHIRSYVDNAKAKEAGGDSRVKNLLKDIQELAGDVEDLLDDFLPKIQQSNKFNYCLKRSSFADEFAMEIEKIKRRVVDIDRIRKTYNIIDTDNNNDDCVLLDRRRLFLHADETEIIGLDDDFNMLQAKLLNQDLHYGVVSIVGMPGLGKTTLAKKLYRLIRDQFECSGLVYVSQQPRASEILLDIAKQIGLTEQKMKENLEDNLRSLLKIKRYVILLDDIWDVEIWDDLKLVLPECDSKVGSRMIITSRNSNVGRYIGGESSLHALQPLESEKSFELFTKKIFNFDDNNSWANASPDLVNIGRNIVGRCGGIPLAIVVTAGMLRARERTEHAWNRVLESMGHKVQDGCAKVLALSYNDLPIASRPCFLYFGLYPEDHEIRAFDLINMWIAEKFIVVNSGNRREAEDLAEDVLNDLVSRNLIQLAKRTYNGRISSCRIHDLLHSLCVDLAKESNFFHTAHDAFGDPGNVARLRRITFYSDNVMIEFFRSNPKLEKLRVLFCFAKDPSIFSHMAYFDFKLLHTLVVVMSQSFQAYVTIPSKFGNMTCLRYLRLEGNICGKLPNSIVKLTRLETIDIDRRSLIQPPSGVWESKHLRHLCYRDYGQACNSCFSISSFYPNIYSLHPNNLQTLMWIPDKFFEPRLLHRLINLRKLGILGVSNSTVKMLSIFSPVLKALEVLKLSFSSDPSEQIKLSSYPHIAKLHLNVNRTMALNSQSFPPNLIKLTLAYFSVDRYILAVLKTFPKLRKLKMFICKYNEEKMDLSGEANGYSFPQLEVLHIHSPNGLSEVTCTDDVSMPKLKKLLLTGFHCRISLSERLKKLSK

SEQ ID NO: 541 - protein, 937 aa, Solanum tuberosum
MAYAAVTSLMRTIHQSMELTGCDLQPFYEKLKSLRAILEKSCNIMGDHEGLTILEVEIVEVAYTTEDMVDSESRNVFLAQNLEERSRAMWEIFFVLEQALECIDSTVKQWMATSDSMKDLKPQTSSLVSLPEHDVEQPENIMVGRENEFEMMLDQLARGGRELEVVSIVGMGGIGKTTLATKLYSDPCIMSRFDIRAKATVSQEYCVRNVLLGLLSLTSDEPDDQLADRLQKHLKGRRYLVVIDDIWTTEAWDDIKLCFPDCYNGSRILLTTRNVEVAEYASSGKPPHHMRLMNFDESWNLLHKKIFEKEGSYSPEFENIGKQIALKCGGLPLAITVIAGLLSKMGQRLDEWQRIGENVSSVVSTDPEAQCMRVLALSYHHLPSHLKPCFLYFAIFTEDEQISVNELVELWPVEGFLNEEEGKSIEEVATTCINELIDRSLIFIHNFSFRGTIESCGMHDVTRELCLREARNMNFVNVIRGKSDQNSCAQSMQRSFKSRSRIRIHKVEELAWCRNSEAHSIIMLGGFECVTLELSFKLVRVLDLGLNTWPIFPSGVLSLIHLRYLSLRFNPCLQQYQGSKEAVPSSIIDIPLSISSLCYLQTFKLNLPFPSYYPFILPSEILTMPQLRTLCMGWNYLRSHEPTENRLVLKNLQCLNQLNPRYCTGSFFRLFPNLKKLQVFGVPEDFRNSQDLYDFRYLYQLEELTFRLYYPYAACFLKNTAPSGSTQDPLRFQTEILHKEIDFGGTAPPTLLLPPPDAFPQNLKSLTFRGEFSVAWKDLSIVGKLPKLEVLILSWNAFIGKEWEVVEEGFPHLKFLFLDDVYIRYWRASSDHFPYLERVILRDCRNLDSIPRDFADITTLALIDIDYCQQSVVNSAKQIQQDIQDNYGSSIEVHTRHLFIPKSVTTVEDDDDSVTTDEDDDDDDFEKEVASCRNNVE

SEQ ID NO: 542 - protein, 159 aa, Tobacco mosaic virus; identical to SEQ ID NO: 26

SEQ ID NO: 543 - protein, 265 aa, Soybean mosaic virus
SGKEKEGDMDAGKDPKKNTSSSKGAGTSSKDVNVGSKGKVVPRLQKITRKMNLPMVEGKIILSLDHLLEYKPNQVDLFNTRATRTQFEAWYNAVKDEYELDDEQMGVVMNGFMVWCIDNGTSPDANGVWVMMDGEEQIEYPLKPIVENAKPTLRQIMHHFSDAAEAYIEMRNSESPYMPRYGLLRNLRDRELARYAFDFYEVTSKTPNRAREAIAQMKAAALSGVNNKLFGLDGNISTNSENTERHTARDVNQNMHTLLGMGPPQ

SEQ ID NO: 544 - protein, 218 aa, Cucumber mosaic virus
MDKSESTSAGRNRRRRLRRGSRSASSSADATFRVLSQQLSRLNKTLAAGRPTINHPTFVGSERCKPGYTFTSITLKPPKIDKGSYYGKRLLLPDSVTEFDKKLVSRIQIRVNPLPKFDSTVWVTVRKVPASSDLSVSAISAMFADGASPVLVYQYAASGVQANNKLLYDLSVMRADIGDMRKYAVLVYSKDDALETDELVLHIDIEHQRIPTSGVLPV

SEQ ID NO: 545 - protein, 236 aa, Potato virus X
MTTPANTTQAVGSTKSTTTTTAGATPANSGLFTIPDGDFFSTAKAVVASNAVATNEDLAKIQEIWKDKKIPSDTMAQAAWDLVRHCADVGSSAQTEMIGTGPYSNGVSRARLAAAIKEVCTLRQFCKKYAPVVWNWMLTNNSPPANWQAQGFKPEHKFAAFDFFDGVTNPAAITPKEGLMRPPSEAEMNAAQTAAFVKITKARAQSNDFASLDAAVTRGRITGTTVAEAVVSLPPP

SEQ ID NO: 546 - protein, 258 aa, Tomato spotted wilt virus
MSKVKLTKESIVALLTQGKDLEFEEDQNLVAFNFKTFCLENIDQIKKMSVISCLTFLKNRQSIMKVIKQSDFTFGKITIKKTSDRIGGTDMTFRRLDSLIRVRLVEETGNSENLNTIKSKIASHPLIQAYGLPLDDAKSVRLAIMLGGSLPLIASVDSFEMISVVLAIYQDAKYKDLGIDPKKYDTKEALGKVCTVLKSKAFEMNEDQVKKGKEYAAILSSSNPNAKGSVAMEHYSETLNKFYEMFGVKKQAKLAELA

SEQ ID NO: 547 - protein, 259 aa, Glycine max
MSGSNDGSGSWSSRFLKVASAAAATAAVAGGLYAILSSSTSASSEMEVPFGSARPESNTKRQQESFYEHEETEDDEESEEADNGKWKKPESGWVKLNVDGSRIHEEPASAGCGGVIRDEWGTWCVGFDQKLDPNICRQAHYTELQAILTGLKVAREDMINVEKLVVESDSEPAVNMVKSGLGYKYHRPEYKVVQDINRLLKDPKWLARLDYVPRKANRVANYLAKRVCKPSSPHDHHHFSKYPCPPDYDCEKIFLEDNN

SEQ ID NO: 548 - DNA, 3774 bp, Solanum lycopersicum
  source 1..3774: mol_type = other DNA
atggaaaaacgaaaagatattgaagaagcaaacaactcattggtgttattttctgctcttagcaaggacattgccaatgttctaattttcctagagaatgaggaaaatcaaaaagctcttgacaaagatcaagttgaaaagctaaaattgaaaatggcatttatttgtacatatgttcagctttcttattccgattttgagcagtttgaagatataatgactagaaatagacaagaggttgagaatctgcttcaatcacttttggatgatgatgtccttactagcctcaccagtaatatggatgactgtatcagcttgtatcatcgttcttataaatcagatgccatcatgatggatgagcaattggacttcctcctcttgaatctgtatcatctatccaagcatcacgctgaaaagatatttcctggagtgactcaatatgaagttcttcagaatgtatgtggcaacataagagatttccatgggttgatactgaatggttgcattaagcatgagatggttgagaatgtcttacctctgtttcaactcatggctgaaagagtaggacacttcctttgggaggatcagactgatgaagactctcggctctccgagctagatgaggatgaacacaatgatagagactctcgactcttccagctaacacatctactcttgaagattgttccaactgaactggaggttatgcacatatgttatacaaatttgaaagcttcaacttcagcagaagttggacgcttcattaagaagctcctggaaacctcaccggatattctcagagaatatatcattcaactacaagagcatatgttaactgttattccccctagcactttaggggctcgaaacattcatgtcatgatggaattcctattacttattctttctgatatgcccaaggactttattcatcatgacaaactttttgatctcttggctcatgttggaacacttaccagggaggtatcgactcttgtacgtgacttggaagagaaattaaggaataaagagggtaataaccaaacaaattgtgcaaccctagacttgctggaaaatattgaactcctcaagaaagatctcaaacatgtttatctgaaagccccaaattcatctcaatgttgcttccccatgagtgatggaccactcttcatgcatcttctacacatgcacttaaatgatttgctagattctaatgcttattcaatttctttgataaaggaagaaatcgagttggtgagtcaagaactggaattcataagatcattctttggggatgctgctgagcaaggattgtataaagatatctgggcacgtgttctagatgtggcttatgaggcaaaagatgtcatagattcaattattgttcgagataatggtctcttacatcttattttctcacttcccattaccataaagaagatcaaacttatcaaagaagagatctctgctttagatgagaacattcccaaggacagaggtctaatcgttgtgaactctcccaagaaaccagttgagagaaagtcattgacaactgataaaataattgtaggttttgaggaggagacaaacttgatacttagaaagctcaccagtggacccgcagatttagatgtcatttcgatcaccggtatgccgggttcaggtaaaactactttggcatacaaagtatacaatgataagtcagtttctagacattttgaccttcgtgcatggtgcacggtcgatcaaggatatgacgacaagaagttgttggatacaattttcagtcaagttagtggctcagattcaaatttgagtgagaatattgatgttgctgataaattgcggaaacaactgtttggaaagaggtatcttattgtcttagatgatgtgtgggatactactacattggatgagttgacaagaccttttcctgaagctaagaaaggaagtaggattattttgacaactcgagaaaaggaagtggctttgcatggaaagctgaacactgatcctcttgaccttcgattgctaagaccagatgaaagttgggaacttttagataaaaggacatttggtaatgagagttgccctgatgaactattagatgtcggtaaagaaatagccgaaaattgtaaagggcttcctttggtggctgatctgattgctggagtcattgctgggagggaaaagaaaaggagtgtgtggcttgaagttcaaagtagtttgagttcttttattttgaacagtgaagtggaagtgatgaaagttatagaattaagttatgaccatttaccacatcacctcaagccatgcttgcttcactttgcaagttggccgaaggacactcctttgacaatctatttgtttactgtttatttgggtgctgaaggatttgtggaaaagacggagatgaagggtatagaagaagtggtgaagatttatatggatgatttaatttccagtagcttggtaatttgtttcaatgagataggtgatatactgaatttccaaattcatgatcttgtgcatgacttttgtttgataaaagcaagaaaggaaaatttgtttgatcggataagatcaagtgctccatcagatttgttgcctcgtcaaattaccattgattatgatgaggaggaggagcactttgggcttaattttgtcatgttcgattcaaataagaaaaggcattctggtaaacacctctattctttgaggataaatggagaccagctggatgacagtgtttctgatgcatttcacctaagacacttgaggcttattagagtgttggacctggaaccctctttaatcatggtgaatgattctttgctgaatgaaatatgcatgttgaatcatttgaggtacttaagaattcggacacaagttaaatatctgcctttctctttctcaaacctctggaatctagaaagtctgtttgtgtctaacaaaggatcaatcttggtactattaccgagaattttggatcttgtaaagttgcgagtgctgtccgtgggtgcttgttctttctttgatatggatgcagatgaatcaatattgatagcaaaggacacaaagttagagaacttgagaatattaggggaactgttgatttcctattcgaaagatacaatgaatattttcaaaaggtttcccaatcttcaggtgcttcagtttgaactcaaggagtcatgggattattcaacagagcaacattggttcccgaaattggattgcctaactgaactagaaacactctgtgtaggttttaaaagttcaaacacaaaccactgtgggtcctctgttgtgacaaatcggccgtgggattttcacttcccttcaaatttgaaagaactgttgttgtatgactttcctctgacatccgattcactatcaacaatagcgagactgcccaaccttgaaaatttgtccctttatgatacaatcatccagggagaagaatggaacatgggggaggaagacacttttgagaatctcaaatttttgaacttgcgtctactgactctttccaagtgggaggttggagaggaatccttccccaatcttgagaaattaaaactgcaggaatgtggtaagcttgaggagattccacctagttttggagatatttattcattgaaatttatcaaaattgtaaagagtcctcaacttgaagattctgctctcaagattaagaaatacgctgaagatatgagaggagggaacgatcttcagatccttggccagaagaatatccccttatttaagtag

SEQ ID NO: 549 - DNA, 2739 bp, Glycine max
  source 1..2739: mol_type = other DNA
atggcttatgctgctgttacttcccttatgagaaccatacatcaatcaatggaacttactggatgtgatttgcaaccgttttatgaaaagctcaaatctttgagagctattctggagaaatcctgcaatataatgggcgatcatgaggggttaacaatcttggaagttgaaatcatagaggtagcatacacaacagaagatatggttgactcggaatcaagaaatgtttttttagcacggaatgtggggaaaagaagcagggctatgtgggggatttttttcgtcttggaacaagcactagaatgcattgattccaccgtgaaacagtggatggcaacatcggacagcatgaaagatctaaaaccacaaactagctcacttgtcagtttacctgaacatgatgttgagcagcccgagaatataatggttggccgtgaaaatgaatttgagatgatgctggatcaacttgctagaggaggaagggaactagaagttgtctcaatcgtagggatgggaggcatcgggaaaacaactttggctgcaaaactctatagtgatccttacattatgtctcgatttgatattcgtgcaaaagcaactgtttcacaagagtattgtgtgagaaatgtactcctaggccttctttctttgacaagtgatgaacctgattatcagctagcggaccaactgcaaaagcatctgaaaggcaggagatacttggtagtcattgatgacatatggactacagaagcttgggatgatataaaactatgtttcccagactgcgataatggaagcagaatactcctgactactcggaatgtggaagtggctgaatatgctagctcaggtaagcctcctcatcacatgcgcctcatgaattttgacgaaagttggaatttactacacaaaaagatctttgaaaaagaaggttcttattctcctgaatttgaaaatattgggaaacaaattgcattaaaatgtggagggttacctctagcaattactttgattgctggacttctctccaaaatcagtaaaacattggatgagtggcaaaatgttgcggagaatgtacgttcggtggtaagcacagatcttgaagcaaaatgcatgagagtgttggctttgagttaccatcacttgccttctcacctaaaaccgtgttttctgtattttgcaattttcgcagaggatgaacggatttatgtaaataaacttgttgagttatgggccgtagaggggtttttgaatgaagaagagggaaaaagcatagaagaggtggcagaaacatgtataaacgaacttgtagatagaagtctaatttctatccacaatgtgagttttgatggggaaacacagagatgtggaatgcatgatgtgacccgtgaactctgtttgagggaagctcgaaacatgaattttgtgaatgttatcagaggaaagagtgatcaaaattcatgtgcacaatccatgcagtgttcctttaagagtcgaagtcggatcagtatccataatgaggaagaattggtttggtgtcgtaacagcgaggctcattctatcatcacgttgtgtatattcaaatgcgtcacactggaattgtctttcaagctagtaagagtactagatcttggtttgactacatgcccaatttttcccagtggagtactttctctaattcatttgagatacctatctttgcgttttaatcctcgcttacagcagtatcgaggatcgaaagaagctgttccctcatcaataatagacattcctctatcgatatcaagcctatgctatctgcaaacttttaaactttaccatccatttcccaattgttatcctttcatattaccatcggaaattttgacaatgccacaattgaggaagctgtgtatgggctggaattacttgcggagtcatgagcctacagagaacagattggttttgaaaagtttgcaatgcctcaatgaattgaatcctcggtattgtacagggtcttttttaagactatttcccaatttaaagaagttggaagtatttggcgtcaaagaggactttcgcaatcacaaggacctgtatgattttcgctacttatatcagctcgagaaattggcatttagtacttattattcatcttctgcttgctttctaaaaaacactgcacctttaggttctactccgcaagatcctctgaggtttcagatggaaacattgcacttagagactcattccagggcaactgcacctccaactgatgttccaactttcctcttacctcctccggattgttttccacaaaaccttaagagtttaacttttagcggagatttctttttggcatggaaggatttgagcattgttggtaaattacccaaactcgaggtccttcaactatcacacaatgccttcaaaggcgaggagtgggaagtagttgaggaagggtttcctcacttgaagttcttgtttctggatagcatatacattcggtactggagagctagtagtgatcactttccataccttgaacgactttttcttagcgattgcttttatttggattcaatccctcgagattttgcagatataaccacactagctcttattgatatatttcgctgccaacaatctgttgggaattccgccaagcaaattcaacaggacattcaagacaactatggaagctctatcgaggtccatactcgttatctttatcgaaatggagcatttttggtagtgtga

SEQ ID NO: 550 - DNA, 2565 bp, Glycine max
  source 1..2565: mol_type = other DNA
atggtagtagcagtggagaaaaccaacctcacttcacaatcacaatgcttcaaccgtgtttctgacaagaagaaagaaagatgcaagacacacatgaacaacgttaacccatgttgttttttgtttctcttatgtgtgtggagccttgttgtgctcccctcatgcgtgaggccagttttgtgtgaagatgaaggttgggatggagtggttgtgacagcatcaaacctcttagcacttgaagctttcaagcaagagttggttgatccagaagggttcttgcggagctggaatgacagtggctatggagcttgttccggaggttgggttggaatcaagtgtgctaagggacaggttattgtgatccagcttccttggaagggtttgaggggtcgaatcaccgacaaaattggtcaacttcaaggcctcaggaagcttagtcttcatgataaccaaattggtggttcaatcccttcaactttgggacttcttcccaaccttagaggggttcagttattcaacaataggcttacaggttccatacctctttctttaggtttctgccctttgcttcagtctcttgacctcagcaacaacttgctcacaggagcaatcccttatagtcttgctaattccactaagctttattggcttaacttgagtttcaactccttctctggtcctttaccagctagcctaactcactcattttctctcacttttctttctcttcaaaataacaatctttctggctcccttcctaactcttggggtgggaattccaagaatggcttctttaggcttcaaaatttgatcctagatcataactttttcactggtgacgttcctgcttctttgggtagcttaagagagctcaatgagatttcccttagtcataataagtttagtggagctataccaaatgaaataggaaccctttctaggcttaagacacttgacatttctaataatgccttgaatgggaacttgcctgctaccctatctaatttatcctcacttacactgctgaatgcagagaacaacctccttgacaatcaaattcctcaaagtttaggtagattgcgtaatctttctgttctgattttgagtagaaaccaatttagtggacatattccttcaagtattgcaaacatttcctcgcttaggcagcttgatttgtcactgaataatttcagtggagaaattccagtctcctttgacagtcagcgcagtctaaatctcttcaatgtttcctacaatagcctctcaggttctgtcccccctctgcttgccaagaaatttaactcaagctcatttgtgggaaatattcaactatgtggatacagcccttcaaccccatgtctttcccaagctccatcacaaggagtcattgccccacctcctgaagtgtcaaaacatcaccatcataggaagctaagcaccaaagacataattctcatagtagcaggagttctcctcgtagtcctgattatactttgttgtgtcctgcttttctgcctgatcagaaagagatcaacatctaaggccgggaacggccaagccaccgagggtagagcggccactatgaggacagaaaaaggagtccctccagttgctggtggtgatgttgaagcaggtggggaggctggagggaaactagtccattttgatggaccaatggcttttacagctgatgatctcttgtgtgcaacagctgagatcatgggaaagagcacctatggaactgtttataaggctattttggaggatggaagtcaagttgcagtaaagagattgagggaaaagatcactaaaggtcatagagaatttgaatcagaagtcagtgttctaggaaaaattagacaccccaatgttttggctctgagagcctattacttgggacccaaaggggaaaagcttctggtttttgattacatgtctaaaggaagtcttgcttctttcctacatggtggtggaactgaaacattcattgattggccaacaagaatgaaaatagcacaagacttggcccgtggcttgttctgccttcattcccaggagaacatcatacatgggaacctcacatccagcaatgtgttgcttgatgagaatacaaatgctaaaattgcagattttggtctttctcggttgatgtcaactgctgctaattccaacgtgatagctacagctggagcattgggataccgggcacctgagctctcaaagctcaagaaagcaaacactaaaactgatatctacagtcttggtgttatcttgttagaactcctaacgaggaaatcacctggggtgtctatgaatggactagatttgcctcagtgggttgcctcagttgtcaaagaggagtggacaaatgaggtttttgatgcagacttgatgagagatgcatccacagttggcgacgagttgctaaacacgttgaagctcgctttgcactgtgttgatccttctccatcagcacgaccagaagttcatcaagttctccagcagctggaagagattagaccagagagatcagtcacagccagtcccggggacgatatcgtatag

SEQ ID NO: 551 - DNA, 2763 bp, Glycine max
  source 1..2763: mol_type = other DNA
atgtctctccccaaaaccctactttctctcttccttctcctcacgatccccctagtaaccgccgatgacgccgcggtgatgtcgaattttctcaaatccctcactccaccgccctcgggctggtctgaaacaaccccattctgccaatggaagggtatccaatgcgattcatccagccacgtgaccagcataagcctcgcttcgcattccctcaccggaacactcccctcggatctcaattccctctctcaactccgcactctctccctccaagacaattccctcaccggcaccctcccttctctctccaacctttctttcctccaaaccgtctacttaaaccgcaacaacttctcctccgtgtcccccaccgctttcgcctccctaacctccctccaaaccctcagcctcggctccaaccctgctctccaaccctggtccttccccaccgacctcacttcctcctctaacctaatcgacctcgacctcgccaccgtatccctcaccggtcccttgccggacattttcgacaaattcccttcccttcaacaccttcgcctctcttacaacaacctcaccggcaatttaccctcctctttctccgccgccaacaatctcgaaacgctctggctcaacaaccaggccgccggcttgtccggtaccctcctcgtcctctccaacatgtctgcattaaaccagtcctggctcaataagaaccagttcaccggttccataccggatttatcgcaatgcacggctttgtctgacttgcagctcagggataaccagttaactggtgtggttcccgcttcattgacaagtcttcctagtttgaagaaagtttctctggataataatgagcttcaggggcctgtgcccgtgtttgggaaaggtgtgaatgttactctcgatgggattaatagtttttgtcttgatactcctgggaattgtgatcccagggtgatggttttgctgcagattgccgaggcattcgggtatccaattcggttggcagagtcgtggaaggggaatgatccgtgtgatggttggaactatgttgtgtgtgctgccggaaagattattactgtcaatttcgagaaacagggtttgcagggtaccatctcccctgcatttgccaatttgactgacttgaggactttgtttctcaatggcaataatttgatcggttctatacctgatagtttgatcactttgcctcagcttcagactcttgatgtgtctgacaacaacctctctggattggttcctaagttcccaccaaaggtgaagttggtgactgcgggaaatgctttgcttgggaaaccccttagtcctggaggtggaccaagtggaactactccttctgggtcttcgaccggtggaagtggtggtgaatcctcaaagggtaattcttcggtgtcgccaggttggattgctggtatagttgttattgtgttgttttttattgcagtggtgttgtttgtgtcttggaagtgttttgtcaacaagctgcaggggaagttcagtagggttaaaggtcatgaaaatgggaaaggaggctttaaacttgatgctgtccatgtttctaatggatatggtggtgttccagttgagttgcaaagccagagcagtggtgatcgcagtgaccttcatgctttagatggtccaacattttctatccaagttcttcgacaagtgacgaataatttcagcgaggagaacattttaggcaggggagggtttggagtagtttataagggggtgttgcatgatggaacaaaaattgctgttaagaggatggaatctgttgcaatggggaacaaaggtcagaaagagttcgaagcagagattgcacttcttagtaaagttaggcatagacatttggttgctcttctagggtattgcatcaatggcaatgaaaggcttttggtgtatgagtatatgcctcaaggtacattaacacagcacctgtttgagtggcaggagcatgggtatgctcctttgacttggaagcaaagggtagtaatagctttggatgtagcgcggggggtggaatacttgcacagtttagctcagcaaagcttcattcatagagacttaaaaccctcaaacatactactaggcgatgacatgagagcaaaggttgctgattttgggttggttaaaaatgcaccagatgggaagtattctgttgagacacggttggctggaacatttggatatcttgcacctgagtatgcagctactggaagagtgacaaccaaagtggatgtttatgcatttggagtagttctgatggaacttatcaccggtagaaaggcattggatgatactgtgccagatgaaaggtctcacttggtgacatggttccgtagggtactaattaacaaggaaaacattccaaaggcaattgatcaaattctcaatccagatgaggaaaccatgggaagcatatatacagtggccgagctggcaggccattgcactgctcgcgaaccataccaaaggccggatatgggtcatgcagtgaacgtcttggttcctcttgtggagcaatggaaacctactagccatgatgaagaagaggaagacggctctggcggtgaccttcatatgagccttcctcaagctctacgaaggtggcaagccaacgaaggcacttcctcaatatttaatgacatttccatctcacaaacccaatcaagcatctcctctaaacctgcagggtttgcagactcctttgattcaatggattgccgttaa

SEQ ID NO: 552 - DNA, 405 bp, Zea mays
  source 1..405: mol_type = other DNA
atgcgcaaacatcgaatcgtctcactcgtggctgccctgctcatactgcttgccctcgccgtatcgtccaaccgcaacgcacaggaggattccatggccgacaacaccgggacgttggtgggcggcatccaggacgtgccggagaacgagaacgaccttcacctccaggagctcgcccgcttcgccgtcgatgagcacaacaagaaggccaatgctcttctggggttcgagaagcttgtgaaggccaagacacaagtggttgctggcacgatgtactatctcactattgaagtgaaggatggcgaagtcaagaagctctacgaagctaaggtctgggagaagccatgggagaagttcaaggagctgcaggaattcaagcctgttgaagagggtgctagcgcctaa

SEQ ID NO: 553 - DNA, 618 bp, Colocasia esculenta
  source 1..618: mol_type = other DNA
atggccttgatggggggcatcgtggatgtggagggagcgcagaacagcgccgaagtagaggagctcgcccgcttcgccgtcgacgaacacaataagaaggagaatgcgcttctgcagttctcccggcttgtgaaggcgaagcaacaggtggtttcgggcattatgcatcacctcactgtggaggttatcgaaggtggcaagaagaaagtgtatgaagccaaggtctgggtccaggcttggcttaactccaagaagcttcatgagttcagccccattggcgattcatcctcggttacgccagcagatctcggtgtaaaacgggatgcgcacgaagcggaatggctagagataccaacacatgatcctgtcgtccaagacgcagcaaaccatgcggtgaagagcatccagcaaagatccaatactttgttcccttatgaactgttggagatccttcatgcaaaggctaaggtgcttgaggacctcgccaaaatccatttgctactcaaacttaagaggggaagcagggaggagaagttcaaggtggaagtgcacaagaacattgaggggactttccatctgaatcagatggagcaagatcattcagactctggaaactag

SEQ ID NO: 554 - DNA, 1434 bp, synthetic construct
  source 1..1434: mol_type = other DNA
atggccatcgatagcaagactactttgcctaggcattcacttatccatacaatcaagctgaactctaacaagaagtatggtcctggtgacatgactaacggaaatcagttcatcatctcaaagcaggagtgggctactatcggagcctacatccagactggacttggattgccagtgaacgagcagcagttgaggacacatgttaacttgtctcaggatatctcaatccctagtgatttctctcagttgtatgacgtttactgttctgataagactagtgcagagtggtggaacaagaacttgtatcctttgatcatcaagtctgctaacgacatcgcttcatacggtttcaaggtggctggtgatccttctatcaagaaggatggatatttcaagaagttgcaggacgagcttgataacatcgttgataacaactctgatgacgacgcaatcgctaaggctatcaaggatttcaaggctagatgtggtatcttgatcaaggaagctaagcagtatgaggaagctgccaagaacatcgtgacatctctcgatcagttcttacatggtgatcagaagaagttagaaggtgttatcaacatccagaagaggttgaaggaagtgcagacagctcttaaccaggctcatggagagtctagtccagctcataaggagctcttggagaaagtgaagaacttgaagacaacattagagaggactatcaaggctgagcaggaccttgagaagaaagtggagtatagcttcttgttaggaccattgttgggattcgtggtttacgagatccttgagaacactgctgttcagcatatcaagaaccagatcgatgagatcaagaagcagttggattctgctcagcatgatttggacagggacgtgaagattatcggaatgttgaacagtatcaacacagatatcgacaacctttactctcaaggacaggaagcaatcaaggttttccagaagttgcaaggaatctgggctactatcggtgctcagatcgagaaccttaggacaacatcattgcaagaggttcaggactctgatgacgctgatgagatccagatcgaactcgaggacgcttctgacgcttggttggttgtggctcaggaggctagggatttcacacttaacgcttactcaactaactctaggcagaaccttccaatcaacgttatctcagattcatgtaactgttcaacaacaaacatgacatcaaaccaatacagcaatccaacaacaaacatgacatcaaaccagtacatgatctcacatgagtacacaagcttgccaaacaacttcatgttgtcaaggaactctaacttggaatacaagtgtcctgagaacaacttcatgatctattggtacaacaactctgactggtacaacaactctgattggtacaacaaccctccataa

SEQ ID NO: 555 - protein, 587 aa, Bacillus thuringiensis
KDQQLFNAIMDAVNKMVDNKFLSYNLSTLNKTIEGLQGNLGLFQNAIQVAICQGSTPERVNFDQNCTPCNPNQPCKDDLDRVASRFDTANSQFTQHLPEFKNPWSDENSTQEFKRTSVELTLPMYTTVATLHLLLYEGYIEFMTKWNFHNEQYLNNLKVELQQLIHSYSETVRTSFLQFLPTLNNRSKSSVNAYNRYVRNMTVNCLDIAATWPTFDTHNYHQGGKLDLTRIILSDTAGPIEEYTTGDKTSGPEHSNITPNNILDTPSPTYQHSFVSVDSIVYSRKELQQLDIATYSTNNSNNCHPYGLRLSYTDGSRYDYGDNQPDFTTSNNNYCHNSYTAPITLVNARHLYNAKGSLQNVESLVVSTVNGGSGSCICDAWINYLRPPQTSKNESRPDQKINVLYPITETVNKGTGGNLGVISAYVPMELVPENVIGDVNADTKLPLTQLKGFPFEKYGSEYNNRGISLVREWINGNNAVKLSNSQSVGIQITNQTKQKYEIRCRYASKGDNNVYFNVDLSENPFRNSISFGSTESSVVGVQGENGKYILKSITTVEIPAGSFYVHITNQGSSDLFLDRIEFVPKIQ

SEQ ID NO: 556 - protein, 1257 aa, Solanum lycopersicum
MEKRKDIEEANNSLVLFSALSKDIANVLIFLENEENQKALDKDQVEKLKLKMAFICTYVQLSYSDFEQFEDIMTRNRQEVENLLQSLLDDDVLTSLTSNMDDCISLYHRSYKSDAIMMDEQLDFLLLNLYHLSKHHAEKIFPGVTQYEVLQNVCGNIRDFHGLILNGCIKHEMVENVLPLFQLMAERVGHFLWEDQTDEDSRLSELDEDEHNDRDSRLFQLTHLLLKIVPTELEVMHICYTNLKASTSAEVGRFIKKLLETSPDILREYIIQLQEHMLTVIPPSTLGARNIHVMMEFLLLILSDMPKDFIHHDKLFDLLAHVGTLTREVSTLVRDLEEKLRNKEGNNQTNCATLDLLENIELLKKDLKHVYLKAPNSSQCCFPMSDGPLFMHLLHMHLNDLLDSNAYSISLIKEEIELVSQELEFIRSFFGDAAEQGLYKDIWARVLDVAYEAKDVIDSIIVRDNGLLHLIFSLPITIKKIKLIKEEISALDENIPKDRGLIVVNSPKKPVERKSLTTDKIIVGFEEETNLILRKLTSGPADLDVISITGMPGSGKTTLAYKVYNDKSVSRHFDLRAWCTVDQGYDDKKLLDTIFSQVSGSDSNLSENIDVADKLRKQLFGKRYLIVLDDVWDTTTLDELTRPFPEAKKGSRIILTTREKEVALHGKLNTDPLDLRLLRPDESWELLDKRTFGNESCPDELLDVGKEIAENCKGLPLVADLIAGVIAGREKKRSVWLEVQSSLSSFILNSEVEVMKVIELSYDHLPHHLKPCLLHFASWPKDTPLTIYLFTVYLGAEGFVEKTEMKGIEEVVKIYMDDLISSSLVICFNEIGDILNFQIHDLVHDFCLIKARKENLFDRIRSSAPSDLLPRQITIDYDEEEEHFGLNFVMFDSNKKRHSGKHLYSLRINGDQLDDSVSDAFHLRHLRLIRVLDLEPSLIMVNDSLLNEICMLNHLRYLRIRTQVKYLPFSFSNLWNLESLFVSNKGSILVLLPRILDLVKLRVLSVGACSFFDMDADESILIAKDTKLENLRILGELLISYSKDTMNIFKRFPNLQVLQFELKESWDYSTEQHWFPKLDCLTELETLCVGFKSSNTNHCGSSVVTNRPWDFHFPSNLKELLLYDFPLTSDSLSTIARLPNLENLSLYDTIIQGEEWNMGEEDTFENLKFLNLRLLTLSKWEVGEESFPNLEKLKLQECGKLEEIPPSFGDIYSLKFIKIVKSPQLEDSALKIKKYAEDMRGGNDLQILGQKNIPLFK

SEQ ID NO: 557 - protein, 912 aa, Glycine max
MAYAAVTSLMRTIHQSMELTGCDLQPFYEKLKSLRAILEKSCNIMGDHEGLTILEVEIIEVAYTTEDMVDSESRNVFLARNVGKRSRAMWGIFFVLEQALECIDSTVKQWMATSDSMKDLKPQTSSLVSLPEHDVEQPENIMVGRENEFEMMLDQLARGGRELEVVSIVGMGGIGKTTLAAKLYSDPYIMSRFDIRAKATVSQEYCVRNVLLGLLSLTSDEPDYQLADQLQKHLKGRRYLVVIDDIWTTEAWDDIKLCFPDCDNGSRILLTTRNVEVAEYASSGKPPHHMRLMNFDESWNLLHKKIFEKEGSYSPEFENIGKQIALKCGGLPLAITLIAGLLSKISKTLDEWQNVAENVRSVVSTDLEAKCMRVLALSYHHLPSHLKPCFLYFAIFAEDERIYVNKLVELWAVEGFLNEEEGKSIEEVAETCINELVDRSLISIHNVSFDGETQRCGMHDVTRELCLREARNMNFVNVIRGKSDQNSCAQSMQCSFKSRSRISIHNEEELVWCRNSEAHSIITLCIFKCVTLELSFKLVRVLDLGLTTCPIFPSGVLSLIHLRYLSLRFNPRLQQYRGSKEAVPSSIIDIPLSISSLCYLQTFKLYHPFPNCYPFILPSEILTMPQLRKLCMGWNYLRSHEPTENRLVLKSLQCLNELNPRYCTGSFLRLFPNLKKLEVFGVKEDFRNHKDLYDFRYLYQLEKLAFSTYYSSSACFLKNTAPLGSTPQDPLRFQMETLHLETHSRATAPPTDVPTFLLPPPDCFPQNLKSLTFSGDFFLAWKDLSIVGKLPKLEVLQLSHNAFKGEEWEVVEEGFPHLKFLFLDSIYIRYWRASSDHFPYLERLFLSDCFYLDSIPRDFADITTLALIDIFRCQQSVGNSAKQIQQDIQDNYGSSIEVHTRYLYRNGAFLVV

SEQ ID NO: 558 - protein, 854 aa, Glycine max
MVVAVEKTNLTSQSQCFNRVSDKKKERCKTHMNNVNPCCFLFLLCVWSLVVLPSCVRPVLCEDEGWDGVVVTASNLLALEAFKQELVDPEGFLRSWNDSGYGACSGGWVGIKCAKGQVIVIQLPWKGLRGRITDKIGQLQGLRKLSLHDNQIGGSIPSTLGLLPNLRGVQLFNNRLTGSIPLSLGFCPLLQSLDLSNNLLTGAIPYSLANSTKLYWLNLSFNSFSGPLPASLTHSFSLTFLSLQNNNLSGSLPNSWGGNSKNGFFRLQNLILDHNFFTGDVPASLGSLRELNEISLSHNKFSGAIPNEIGTLSRLKTLDISNNALNGNLPATLSNLSSLTLLNAENNLLDNQIPQSLGRLRNLSVLILSRNQFSGHIPSSIANISSLRQLDLSLNNFSGEIPVSFDSQRSLNLFNVSYNSLSGSVPPLLAKKFNSSSFVGNIQLCGYSPSTPCLSQAPSQGVIAPPPEVSKHHHHRKLSTKDIILIVAGVLLVVLIILCCVLLFCLIRKRSTSKAGNGQATEGRAATMRTEKGVPPVAGGDVEAGGEAGGKLVHFDGPMAFTADDLLCATAEIMGKSTYGTVYKAILEDGSQVAVKRLREKITKGHREFESEVSVLGKIRHPNVLALRAYYLGPKGEKLLVFDYMSKGSLASFLHGGGTETFIDWPTRMKIAQDLARGLFCLHSQENIIHGNLTSSNVLLDENTNAKIADFGLSRLMSTAANSNVIATAGALGYRAPELSKLKKANTKTDIYSLGVILLELLTRKSPGVSMNGLDLPQWVASVVKEEWTNEVFDADLMRDASTVGDELLNTLKLALHCVDPSPSARPEVHQVLQQLEEIRPERSVTASPGDDIV

SEQ ID NO: 559 - protein, 920 aa, Glycine max
MSLPKTLLSLFLLLTIPLVTADDAAVMSNFLKSLTPPPSGWSETTPFCQWKGIQCDSSSHVTSISLASHSLTGTLPSDLNSLSQLRTLSLQDNSLTGTLPSLSNLSFLQTVYLNRNNFSSVSPTAFASLTSLQTLSLGSNPALQPWSFPTDLTSSSNLIDLDLATVSLTGPLPDIFDKFPSLQHLRLSYNNLTGNLPSSFSAANNLETLWLNNQAAGLSGTLLVLSNMSALNQSWLNKNQFTGSIPDLSQCTALSDLQLRDNQLTGVVPASLTSLPSLKKVSLDNNELQGPVPVFGKGVNVTLDGINSFCLDTPGNCDPRVMVLLQIAEAFGYPIRLAESWKGNDPCDGWNYVVCAAGKIITVNFEKQGLQGTISPAFANLTDLRTLFLNGNNLIGSIPDSLITLPQLQTLDVSDNNLSGLVPKFPPKVKLVTAGNALLGKPLSPGGGPSGTTPSGSSTGGSGGESSKGNSSVSPGWIAGIVVIVLFFIAVVLFVSWKCFVNKLQGKFSRVKGHENGKGGFKLDAVHVSNGYGGVPVELQSQSSGDRSDLHALDGPTFSIQVLRQVTNNFSEENILGRGGFGVVYKGVLHDGTKIAVKRMESVAMGNKGQKEFEAEIALLSKVRHRHLVALLGYCINGNERLLVYEYMPQGTLTQHLFEWQEHGYAPLTWKQRVVIALDVARGVEYLHSLAQQSFIHRDLKPSNILLGDDMRAKVADFGLVKNAPDGKYSVETRLAGTFGYLAPEYAATGRVTTKVDVYAFGVVLMELITGRKALDDTVPDERSHLVTWFRRVLINKENIPKAIDQILNPDEETMGSIYTVAELAGHCTAREPYQRPDMGHAVNVLVPLVEQWKPTSHDEEEEDGSGGDLHMSLPQALRRWQANEGTSSIFNDISISQTQSSISSKPAGFADSFDSMDCR

SEQ ID NO: 560 - protein, 134 aa, Zea mays
MRKHRIVSLVAALLILLALAVSSNRNAQEDSMADNTGTLVGGIQDVPENENDLHLQELARFAVDEHNKKANALLGFEKLVKAKTQVVAGTMYYLTIEVKDGEVKKLYEAKVWEKPWEKFKELQEFKPVEEGASA

SEQ ID NO: 561 - protein, 205 aa, Colocasia esculenta
MALMGGIVDVEGAQNSAEVEELARFAVDEHNKKENALLQFSRLVKAKQQVVSGIMHHLTVEVIEGGKKKVYEAKVWVQAWLNSKKLHEFSPIGDSSSVTPADLGVKRDAHEAEWLEIPTHDPVVQDAANHAVKSIQQRSNTLFPYELLEILHAKAKVLEDLAKIHLLLKLKRGSREEKFKVEVHKNIEGTFHLNQMEQDHSDSGN

SEQ ID NO: 562 - protein, 475 aa, Bacillus thuringiensis
MIIDSKTTLPRHSLIHTIKLNSNKKYGPGDMTNGNQFIISKQEWATIGAYIQTGLGLPVNEQQLRTHVNLSQDISIPSDFSQLYDVYCSDKTSAEWWNKNLYPLIIKSANDIASYGFKVAGDPSIKKDGYFKKLQDELDNIVDNNSDDDAIAKAIKDFKARCGILIKEAKQYEEAAKNIVTSLDQFLHGDQKKLEGVINIQKRLKEVQTALNQAHGESSPAHKELLEKVKNLKTTLERTIKAEQDLEKKVEYSFLLGPLLGFVVYEILENTAVQHIKNQIDEIKKQLDSAQHDLDRDVKIIGMLNSINTDIDNLYSQGQEAIKVFQKLQGIWATIGAQIENLRTTSLQEVQDSDDADEIQIELEDASDAWLVVAQEARDFTLNAYSTNSRQNLPINVISDSCNCSTTNMTSNQYSNPTTNMTSNQYMISHEYTSLPNNFMLSRNSNLEYKCPESNFMIYWYNNSDWYNNSDWYNN

SEQ ID NO: 563 - DNA, 1000 bp, Pseudomonas syringae
  source 1..1000: mol_type = other DNA
atgaacaagcgctacggcaacaacttgccgggatcctgttgcgcgctgagcaaccggatcgactggacgtcaccttcgcgcagcacgccatctggcaaaaaggccgccgttaatcgtttccaatatttctgcaggagtctgcccgtgaccaccttcaccgtgcccctgattctgtcggatgcaagccccacggcactcgccgctaccgcgcaacgtctgcgcgccgagcacgagacgcgctccttcgccgctgatgactgacatcaccgtgcccttccagctcggaatgcacttcgtcttcccagctttcctgatacggctgacgatacattttgcggaagtgattgcggatcaggttcagcgcgatgccacacagccaggtctgcggtttgctggcatgttgaaacttgtgctcgttacgcagggcttcaagaaacacgcactggagaatgtcatccacatcatcagggttcatcacccgcttttggataaacgccctgcagggcgtttatccaaaagcgggtgatgaaccctgatgatgtggatgacattctccagtgcgtgtttcttgaagccctgcgtaacgagcacaagtttcaacatgccagcaaaccgcagacctggctgtgtggcatcgcgctgaacctgatccgcaatcacttccgcaaaatgtatcgtcagccgtatcaggaaagctgggaagacgaagtgcattccgagctggaagggcacggtgatgtcagtcatcagcggcgaaggagcgcgtctcgtgctcggcgcgcagacgttgcgcggtagcggcgagtgccgtggggcttgcatccgacagaatcaggggcacggtgaaggtggtcacgggcagactcctgcagaaatattggaaacgattaacggcggcctttttgccagatggcgtgctgcgcgaaggtgacgtccagtcgatccggttgctcagcgcgcaacaggatcccggcaagttgttgccgtagcgcttgttcat

SEQ ID NO: 564 - DNA, 1313 bp, Arabidopsis thaliana
  source 1..1313: mol_type = other DNA
atggcctctctattctcttcagttctcttgtctctttgtttactctcttcactttttctctcaaatgcaaacgctaagccaaaactaggcttcaccgcggatctaatccaccgtgattctcctaaatcgccgttctataacccgatggaaacctcttcccagcgtctacgaaacgcgatccaccgatccgttaaccgtgttttccatttcactgaaaaggataacacaccacaaccacagattgacctcacctcaaatagcggtgaatatctcatgaacgtatccattggaacacctcctttcccgatcatggccatcgccgacaccggaagtgatctcctctggacgcagtgcgcaccatgcgatgattgttacactcaagttgatcctctctttgaccctaaaacgtcttccacatacaaagacgtttcttgctcctcaagtcaatgtactgccctagaaaatcaagcctcttgttccacaaatgacaacacttgttcttactcattgtcttacggggataactcatacacaaagggtaacatcgccgtggataccttaacgctcggctccagcgatacccgccctatgcagcttaagaatattattatcggttgtggtcacaacaacgctggaacgtttaacaagaaaggctctggaatcgtcggactaggtggtggtccggtttcgcttatcaagcaacttggcgactccatcgacggtaaattctcatactgcttggttcctctaacttccaaaaaggatcaaacgagtaaaatcaacttcggaaccaatgccatcgtgtcgggatcaggagttgtctcaactcctctgatcgcaaaggcgtctcaagagaccttctattacctaaccctaaaatccattagcgtgggaagcaagcaaatccaatactcaggctcagattctgaaagcagcgagggaaacatcatcatcgattcaggcacaactttaacgttattaccgactgaattttactccgagctcgaggatgcggttgcatcctctatcgatgctgagaagaagcaagatccacaaagcggtttgagtctatgttacagtgcaaccggagatctaaaagttccagtcattactatgcattttgatggagccgatgtgaagcttgactcctccaatgcctttgtacaagtctcggaggatttggtttgctttgccttccgcggaagcccgagtttctccatatacggtaatgtggcgcagatgaactttcttgttggatacgacactgtttccaaaacggtgtcatttagccaacagattgtgcaaagatgtag

SEQ ID NO: 565 - DNA, 1771 bp, Poncirus trifoliata
  source 1..1771: mol_type = other DNA
ttgagaggaatatatattgtagctgttggcgactaatagatgattgttaattattaatgaatcagatattgtgttttgtgttagatttagtgattgatgatcttttcagtgacacagcgacacaaataacatcaaatatgttaatttatagttttataccatatcgattcaaaaccaaatacagtaaaacgaactaatcgttcgtaggatgatacaatcttgcgaaatacaaaatttaattactgcttggtgcagtcagtcggtctaaatgacactgtttgttgttctatgtcatagccgactaaaaagttagtctgcattatattaccataaagttgcagactattggtggtacctttaaaaacagaacatacaatatccttcgaaaccttcacaaaaaagttggaacgactcaatttcacatctgcacctctgaaatgtattgtaacttcaggaacttgagatagtgaattaaaactgtagcaaagttcaaatgatcctttggggtctgcaacaggttgtgcctcaatcatactggacattactgacaacaattttgagttataaccttgtggcaataaggtaaatgttgtaccagaatcgattacaatgtctcttcctggagtcgatccagacataacttctagtctttggtttcctacactgattgcatcaattgtgagaacataagaggttttggctttagtcaagggagtagaaaccactcctgggcctgaaacaattccattggttccaaaattgattttggttgaggttgctggaaccaaacaataggagaatttaccagcaattgtagttcgcatttgagaaataagtgaaatatcgccgcctccaaggccaacaattccggttgtttttgaattaaacaagccaccattgtttgttccgcaaccaaaggttattccaggcagagccacggcctgtcctgttgttgaacccaaagtaacagtttcggtagcaagattgccatttgagaaggatccatctccataagagaccgagtattgacaatttaccccagagcaagatttttggctaagagatgcacattggcttgaggagcatggaagagatttgtaagtagatgactttttaggatcaaaaagtggagagtcctgcatgtaacattttgatggtgggcaaggctcgcactgcgtccatatgaggtcacttcctgtatcagcaacagctagtatttcagtagcgggagtaccaattgatatacgtatgagatattctcccctattgggtattatatcagcttgggaagcggctgatgaagatattgatgagttctgattaaagtgattaagacgattgagagaacgagtcaaagcatttctcaatcgttggtagggagtttcactggagttgtaaaagggagacttgggagagtcacggtggattagctcaacactgaaacctccagtttgagcttctattggagagacaacataaaaacaaagaaagaagagaatgaatgcacaactcaagaaggttgccataatcaaagctgtgattgaggtaataagaaagtggcaacgagtctatgcttatatagaggaggacacagagagataagttgcaaaatttaattaattttgaatagaagaccaaaaaaaaaaaaaaaaggaaagaaaatgagcttccaagaaaatgaaactttcttgtgtagtaagcttttgttatagtgacaattatcttatgggagggcctaagttacgttyaacgtaayttaygccctctcaca

SEQ ID NO: 566 - DNA, 1426 bp, Poncirus trifoliata
  source 1..1426: mol_type = other DNA
atggcaaccttcttgagttgtgcattcattctcttctttttttttttttatgttgtctctccaatagaagctcaaactggaggtttcagtgttgagctaatccaccgtgactctcccaagtctcccttttacaactccagtgaaactccctaccaacgattgagaaatgcttttactcgttctaccaatcgtcccaatcactttaatcagaactcatcaatatcttcatcaaaagcttcccaagctgatataatacccaatatgggagactatctcatacgtatatcaattggtactcccgcgactgaaatactagcagttgctgatacaggaagtgacctcatatggacgcagtgcgagccttgcccaccatcacaatgttacatgcaggactctccacttttttatcctaaaaagtcatctacttacaaatctcttccatgctcctcaagccaatgtgcatctcttagccaaaaatcttgctctggggtaaattgtcaatactcggtctcttatggagatggatccttctcaaatggcaatcttgctaccgaaactgttactttgggttcaacaacaggacaggccgtggctctgcctggaataacctttggttgcggaacaaacaatggtggcttgtttaattcaaaaacaaccggaattgttggccttggaggcggcggtatttcacttatttctcaaatgcgaactacaattgctggtaaattctcctattgtttggttcaggcaagctcaaccaaaatcaattttggaaccaatggaattgtttcaggtccaggagtggtttctactcccttgattgttaaatccaaaaccttttatgctctcacaattgatgcaatcagtgtaggaaaccaaagactagaagttatgtctggatcgactccaggaggagacattgtaatcgattctggtacaacacttaccttattgccacaacgttataactcaaaattgttgtcagtaatgtccagtatgattgaggcacaacctgttgcagaccctaaaggatcacttgaactttgctacagttttaattcactatctcaagttcctgaagttacaatacatttcagaggtgcagatgtgaaattgagtccttccaacttttttgtgaaggtttcgaaggatattgtatgttctgtttttaaaggtaccaatmgtctgccactttatggtaatataatgcagactaactttttggtcggctatgacatagaacaaggaacagtgtcatttaaaccgactgattgcaccaagcaataattaattgggaagcttaatcgatattctccactctactagagtttgatcgagtgattttcaaaccactttctttagcagatcaaccgatttcaaattctaatgcgattggagctgaataaaatctatttaaataaatgta

SEQ ID NO: 567 - DNA, 192 bp, Hyalophora cecropia
  source 1..192: mol_type = other DNA
atgaatttcgcaaagatcctatccttcgtcttcgctctggtgctggctttgagcatgaccagcgctgctcccgagcccaggtggaagatcttcaagaaaattgaaaaaatgggcaggaacatccgtgatggcatcgtcaaagcgggcccggcgatcgaggtcctcggttcggctaaagctataggaaaatga

SEQ ID NO: 568 - DNA, 33 bp, synthetic construct
  source 1..33: mol_type = other DNA
aaaaaactgtttaaaaaaattctgaaatatctg

SEQ ID NO: 569 - DNA, 45 bp, synthetic construct
  source 1..45: mol_type = other DNA
aaatggaaactgtttaaaaaaattggcgcggtgctgaaagtgctg

SEQ ID NO: 570 - DNA, 219 bp, Medicago truncatula
  source 1..219: mol_type = other DNA
atggagaagaaatcactagcaggcttatgcttcctcttcctcgttctctttgttgcacaagaaattgtggtgactgaagctaagacttgtgagaatttggctgataaatacaggggaccatgctttagtggttgtgatactcactgcactaccaaagagaatgcagttagcggcaggtgcagggatgactttcgttgttggtgtactaaaagatgttaa

SEQ ID NO: 571 - DNA, 495 bp, Raphanus sativus
  source 1..495: mol_type = other DNA
atggagaagaaatcactagctggcttgtgcttcctcttcctcgttctctttgttgcacaagaaattgtggtgactgaagccaaaacttgtgagaatttggctgataaatacaggggaccatgcttcagtggctgtgacactcattgcacaaccaaagaacacgcagttagcggcaggtgcagggatgactttcgctgctggtgtactaaaagatgtagcaacgcagcagacgaggtggcgacgccacaagacatggctaagtttgcttctatcattgtccttctcttcgttgctcttgtcgtttttgctgctttcgaagaaccaacaatggtggaagcacagaagttgtgtcagaggccaagtgggacatggtcaggagtctgtggaaataataacgcatgcaagaatcagtgcattcgacttgagaaagcacgacatgggtcttgcaactatgtcttcccagctcacaagtgtatctgttatttcccttgttaa

SEQ ID NO: 572 - DNA, 243 bp, Arabidopsis thaliana
  source 1..243: mol_type = other DNA
atggctaagtctgctaccatcgttactcttttcttcgctgctcttgttttctttgctgctcttgaagcaccgatggtggtggaagcacagaagttgtgcgagaggccaagtgggacatggtccggagtttgcggaaacagtaacgcgtgcaagaatcagtgcattaaccttgagaaagcacgacatggatcttgcaactatgtcttcccagctcacaaatgtatctgctacttcccatgttaa

SEQ ID NO: 573 - DNA, 24 bp, Brassica oleracea
  source 1..24: mol_type = other DNA
ttttggcagaaaatgagctttgcg

SEQ ID NO: 574 - DNA, 21 bp, Photorhabdus sp.
  source 1..21: mol_type = other DNA
tggaactggagcaaaagcttt

SEQ ID NO: 575 - DNA, 30 bp, Urechis unicinctus
  source 1..30: mol_type = other DNA
gcggcgggcatgggcttttttggcgcgcgc

SEQ ID NO: 576 - protein, 437 aa, Arabidopsis thaliana
MASLFSSVLLSLCLLSSLFLSNANAKPKLGFTADLIHRDSPKSPFYNPMETSSQRLRNAIHRSVNRVFHFTEKDNTPQPQIDLTSNSGEYLMNVSIGTPPFPIMAIADTGSDLLWTQCAPCDDCYTQVDPLFDPKTSSTYKDVSCSSSQCTALENQASCSTNDNTCSYSLSYGDNSYTKGNIAVDTLTLGSSDTRPMQLKNIIIGCGHNNAGTFNKKGSGIVGLGGGPVSLIKQLGDSIDGKFSYCLVPLTSKKDQTSKINFGTNAIVSGSGVVSTPLIAKASQETFYYLTLKSISVGSKQIQYSGSDSESSEGNIIIDSGTTLTLLPTEFYSELEDAVASSIDAEKKQDPQSGLSLCYSATGDLKVPVITMHFDGADVKLDSSNAFVQVSEDLVCFAFRGSPSFSIYGNVAQMNFLVGYDTVSKTVSFKPTDCAKM

SEQ ID NO: 577 - protein, 63 aa, Hyalophora cecropia
MNFAKILSFVFALVLALSMTSAAPEPRWKIFKKIEKMGRNIRDGIVKAGPAIEVLGSAKAIGK

SEQ ID NO: 578 - protein, 11 aa, synthetic construct
KKLFKKILKYL

SEQ ID NO: 579 - protein, 15 aa, synthetic construct
KWKLFKKIGAVLKVL

SEQ ID NO: 580 - protein, 72 aa, Medicago truncatula
MEKKSLAGLCFLFLVLFVAQEIVVTEAKTCENLADKYRGPCFSGCDTHCTTKENAVSGRCRDDFRCWCTKRC

SEQ ID NO: 581 - protein, 164 aa, Raphanus sativus
MEKKSLAGLCFLFLVLFVAQEIVVTEAKTCENLADKYRGPCFSGCDTHCTTKEHAVSGRCRDDFRCWCTKRCSNAADEVATPQDMAKFASIIVLLFVALVVFAAFEEPTMVEAQKLCQRPSGTWSGVCGNNNACKNQCIRLEKARHGSCNYVFPAHKCICYFPC

SEQ ID NO: 582 - protein, 80 aa, Arabidopsis thaliana
MAKSATIVTLFFAALVFFAALEAPMVVEAQKLCERPSGTWSGVCGNSNACKNQCINLEKARHGSCNYVFPAHKCICYFPC

SEQ ID NO: 583 - protein, 8 aa, Brassica oleracea
FWQKMSFA

SEQ ID NO: 584 - protein, 7 aa, Photorhabdus sp.
WNWSKSF

SEQ ID NO: 585 - protein, 10 aa, Urechis unicinctus
AAGMGFFGAR

SEQ ID NO: 586 - DNA, 5245 bp, Maize-associated tombusvirus
  source 1..5245: mol_type = other DNA
gcccggtgaggtattttcactccatctagacttcatgaaaccttgattggtggattgtcgtgggatggggcagagttcgccacacgtagcttcacagcgcggactggtaatatgtggaactatcctagttaaggggggtgcataccataatttgctcaccctggtccttggtaaggttgatggacccgggaaggaacccgatacattccggacttgcgagagtcccgcggccggcgtaatggcgattgaggaaggtaaagcgcaccgtaaatgcgcagtgggagtgcacctgattacaaaatcgctggatacgttatgcgcgcgtaccagtgtcccacatcgcgttactcagcttgggaaactggggcctgtccgtttcggatgggtgtcaaccccataggaaggtaaggcgcaccttaaatgcacaatgggagtaaacctaattacaaatctctaggtcagaagatcgagccactacgtgccgtggcgataaacttgcattgtgatggagatttggtcgctaatacctaccatctaaatcctcaagttgatgacccgcctggccccacgcctggggctaaccacaaccctatcactcaatcatggctacaactacacagaaccccgaatttaacttgaacgcccgaattcagcttctgcgtgtttgccctgatgttgtctttacttcgcctgagcctgaagttgagacgccagttttggaggaagttgcacctttgccagtggtgccgtctccctccatgccggcccgcccgtctttcccttgcggattgccgaaagtggacgttgtgtctgccttcctttcgttcttcccggcatacgtgccagcggcagtgcaacaggaggtagatgtcctagtccatcagtacgacgcaccatgtgtggacgaggccagggacggtttggatgtggtagggaccagcagcgtggctgctggcgagaagtcaaagccggtgcgcaagccgcgtgccgacaactccaggtggtgggtgaattactctctgttggctcatgccgagttcaacagcccgaagtacacccgtgcacaggagatgattgtgtccgcttggattcgtaagacgatgtcgtctgacggtgtcacagggctacagatcgcacaggtcttggccgctgccaccaggatggcatttgtcccaaatgcttcggacatccttgctgcccagattggttcagtccaatccatcaaggctcgtgagcgcctcgttgccaccagatggtggagtagctggtgggacagctattctggccgctacgacagtagcgaatagggtggcccagtgagcgtaccagggagggacgcggcagagtctgtcgccccacaccctcctagtttggtggtgcgcaataaagtgggacacgccaaccgcgttcgacgcactttcttggtggggcaaaggatgtccccgccgcgtcgtatctacgcgttcaattcatccttgcaaaacctagtcaaaggggtgaaggagcgagtcttcttcgtcaaaagcccctctggcggatttgaaaccgtcccggcacccttggacggtatcgctgaagccaggcttgggcatctccgagataccttggtgagcttgtgtccacgtctgtgcccgttggaacgagaggagtaccctctccagtacacgggtaagaaacgggccacatacaccaaggctgtggaagctctacgtagtagggagctgacacgtaaggacgcagaggtcacaattttcacaaagaccgagcgcacgctcaagcatgacgcggtaccccggatcgtttcgccaatgagtccggaatgcaatctagagacgggtaggtttgtgaagcctatggaagccccgatctgtaaagccattgctgctatggctggccacaccgttgtgatgaagggcaaaaatgcatcacaaattggtgacgttcttaagcagcattgggatgagatgggaggtgacggagtatgcgtcgctatcggattggacgcgtccaggtttgaccagcatgtttcgaagcaatttttgcagttcgagcatactcattatccgcctttgcttatcagtcctttggaccgggctgagtgcaagcggttgttgagttggcagtgtgacaccactgcctttggtcgcacctcggatggcactgtcaagtattcaatttccggtacacgcctttctggcgtgatcaataccggccttggcaattgtatcatagcgtccgagatgtgtattgcgtattgtcgcgaacgtggtgtagatttccgcttggccaacaatggagatgattgtgtcatcttcttgaataagcgggatcttgccgtgttcagcgacggcctctcattgtggttcagggagatgggattcaacatggtagtggaggagcccgtatacgagctggaggaggttgtgttttgtcaggcacaacctgtcttcgacgggcaatcctgggtcatggttcgtgaccccaggtccgctatcgcgaaggattgtgtttccttgaagccgtggcgtaacgagaaagagtatcaaagctggatcaagtcagttgggatgtcggggcgcgccttagctggtggcatccccatctacaatgagttctattccagttttgttcaagctggtggtgcagcacgtcccttgtccatggaggacccatccgttggtggtggtctctattggatgtctaagggtatgcaccgccagggtttggccgtatcggaccaagcccgcctttcgttttggaaggcgtttggcatcgacgcacagatgcaactcgaactcgaaaaacattacgccaacaccattccgaaatttattcctgtagagaaagtagaagatcttggggacgtataccccacgatggactgcgactatctcaggatgcttcccccttgccagggttaaccggcagcaattgggttgtagggactaagtgggccaaaactgtgaagcaggtaactgtggacgcaaaacttcagtgctaaatcgagaaatcgtaaatgccgagagactgcacggctcaaccccgccgacggggtgccctatgatgtacagtcctgttgtggtggcaggatccaatacacaccacatttacaaactgtcgatctcaatcacaatcagcaattccaccgtcatcatcgagaatggcgcgcaagaatcaacaacagaatgccgcaaaggcaatcaaccaaaagaagaccaaagccaaaaccaagtctgcggtcgtccgtgctccaacttccatctctgtcagaaataccacccagaattctgggtcaaggcaggaggtaatgatcggaacggtcacgaacgaagcaaaagtgctcaccctgcactgcgccaacatgccgtggttgcagggggtggctccgtcataccagacttggaacatgaaagacgtacgcgtcaagttcgtaccccggatgtcgacagcgacaaacgggacggtctcgatgtgttttctgagggacttcgaggacgctaccccgacgactgtcgaccaaatgtccctagtccaggggacggtcagcgcggcagtctgggacaagctgaacctccgcgtccccgatcgaaaagcaatggcgtactgctcccgctcaaactttctattaatgggctcaaccgacaaaagcgagcgagccctggggcggatagtagttgtgcctgataccgatcttgacatcaaggccaagattgggtacctgtatgtggagtacactccgcaatttacaggaccaatcgacccattgctacaaaaggaaggctaggtctctgatagccccactacgaccgtaccaactgaacccacacaacctgaacctggtccactacccgggactgatccgactccagagcctgagccggatccagtaccggaaggtgaacagtactccacacccaccaagaaagcgatgttcaacgcctcctgggcgaataacgatttccttgggttggggtactctgccaggatcaccacgaattttgaatatatgcacagcggcgccggactcacagagaacggttgggtgttgcaaaacaaccatgctgaggctgctatcaacattttcgtggaattgattattcacatcaaaggttataagggtttctattggaagaagggtggttaccttcaacttacggatagtgtcgctatcgactatcaaccaagctggcgcgacggcgcggggagggtggtatgcgtctggagtggcaccctgtggcccaactcttggatagcattgtggtacaacaacgacgctgagtccggtacaacagagcaacctgttggcgcttacgtcgaatgttacgtccgggagatcattggcaacgaagatgtctcccaggccatacccaccaaacccccgtaccgtaggagaatcggtcgtgatgagccaaacgatgccgatatgtacacatttccagtctcactcccaccttcgggtctggtggacttggtggcgtacaagggttccaacatcgtaaggctatatcatcaactcttgaatgagttcaatccaggaagtggttctgggtataggacgggctggaggtttagcgagccggagcacgatacggtcaccaggtccatgtaccaggagagcgtcaatggcaacggttatctgtaccttccggtcggaaatccttcctgggatagcaaaccgcatcctatcagcttcgagatcgtgggatccaagctggcattgaagtctgagagggggcaatatctcgcttggcccaccactgggtctgtgggaaattacgatggcgcgcttgctagttatgagttggtttacactaatgcgatttctgagtcaattttgtgggatgtttctgtgatttcttaatggttcgtagtttgcttatttctttagtagaatgcgttgggccgtataggcgccgcacaaagagcagggtagtgcatgaggggcgagaggacccgtaatagaaatctcgcccggctggaaacctgcgttccgcgtgcccaacaaacgccacatctcctcagtggctaaacgagggaaaaacaatgtttcgtggcggcggtacactttacaccgtggctgggcgccaaacacctgtaattgtgcaggggcccaaatttcgtgctaactttcgttgcgggagagggtggaacctcttcttcttttctactacgtgtccagaggggcaccgaggctggggtcccatccgcgaggatggggggcacccacgagtctttccaaactgct

SEQ ID NO: 587 - protein, 772 aa, Maize-associated tombusvirus
MATTTQNPEFNLNARIQLLRVCPDVVFTSPEPEVETPVLEEVAPLPVVPSPSMPARPSFPCGLPKVDVVSAFLSFFPAYVPAAVQQEVDVLVHQYDAPCVDEARDGLDVVGTSSVAAGEKSKPVRKPRADNSRWWVNYSLLAHAEFNSPKYTRAQEMIVSAWIRKTMSSDGVTGLQIAQVLAAATRMAFVPNASDILAAQIGSVQSIKARERLVATRWWSSWWDSYSGRYDSSEXGGPVSVPGRDAAESVAPHPPSLVVRNKVGHANRVRRTFLVGQRMSPPRRIYAFNSSLQNLVKGVKERVFFVKSPSGGFETVPAPLDGIAEARLGHLRDTLVSLCPRLCPLEREEYPLQYTGKKRATYTKAVEALRSRELTRKDAEVTIFTKTERTLKHDAVPRIVSPMSPECNLETGRFVKPMEAPICKAIAAMAGHTVVMKGKNASQIGDVLKQHWDEMGGDGVCVAIGLDASRFDQHVSKQFLQFEHTHYPPLLISPLDRAECKRLLSWQCDTTAFGRTSDGTVKYSISGTRLSGVINTGLGNCIIASEMCIAYCRERGVDFRLANNGDDCVIFLNKRDLAVFSDGLSLWFREMGFNMVVEEPVYELEEVVFCQAQPVFDGQSWVMVRDPRSAIAKDCVSLKPWRNEKEYQSWIKSVGMSGRALAGGIPIYNEFYSSFVQAGGAARPLSMEDPSVGGGLYWMSKGMHRQGLAVSDQARLSFWKAFGIDAQMQLELEKHYANTIPKFIPVEKVEDLGDVYPTMDCDYLRMLPPCQG

SEQ ID NO: 588 - DNA, 2316 bp, Maize-associated tombusvirus
  source 1..2316: mol_type = other DNA
atggctacaactacacagaaccccgaatttaacttgaacgcccgaattcagcttctgcgtgtttgccctgatgttgtctttacttcgcctgagcctgaagttgagacgccagttttggaggaagttgcacctttgccagtggtgccgtctccctccatgccggcccgcccgtctttcccttgcggattgccgaaagtggacgttgtgtctgccttcctttcgttcttcccggcatacgtgccagcggcagtgcaacaggaggtagatgtcctagtccatcagtacgacgcaccatgtgtggacgaggccagggacggtttggatgtggtagggaccagcagcgtggctgctggcgagaagtcaaagccggtgcgcaagccgcgtgccgacaactccaggtggtgggtgaattactctctgttggctcatgccgagttcaacagcccgaagtacacccgtgcacaggagatgattgtgtccgcttggattcgtaagacgatgtcgtctgacggtgtcacagggctacagatcgcacaggtcttggccgctgccaccaggatggcatttgtcccaaatgcttcggacatccttgctgcccagattggttcagtccaatccatcaaggctcgtgagcgcctcgttgccaccagatggtggagtagctggtgggacagctattctggccgctacgacagtagcgaaggtggcccagtgagcgtaccagggagggacgcggcagagtctgtcgccccacaccctcctagtttggtggtgcgcaataaagtgggacacgccaaccgcgttcgacgcactttcttggtggggcaaaggatgtccccgccgcgtcgtatctacgcgttcaattcatccttgcaaaacctagtcaaaggggtgaaggagcgagtcttcttcgtcaaaagcccctctggcggatttgaaaccgtcccggcacccttggacggtatcgctgaagccaggcttgggcatctccgagataccttggtgagcttgtgtccacgtctgtgcccgttggaacgagaggagtaccctctccagtacacgggtaagaaacgggccacatacaccaaggctgtggaagctctacgtagtagggagctgacacgtaaggacgcagaggtcacaattttcacaaagaccgagcgcacgctcaagcatgacgcggtaccccggatcgtttcgccaatgagtccggaatgcaatctagagacgggtaggtttgtgaagcctatggaagccccgatctgtaaagccattgctgctatggctggccacaccgttgtgatgaagggcaaaaatgcatcacaaattggtgacgttcttaagcagcattgggatgagatgggaggtgacggagtatgcgtcgctatcggattggacgcgtccaggtttgaccagcatgtttcgaagcaatttttgcagttcgagcatactcattatccgcctttgcttatcagtcctttggaccgggctgagtgcaagcggttgttgagttggcagtgtgacaccactgcctttggtcgcacctcggatggcactgtcaagtattcaatttccggtacacgcctttctggcgtgatcaataccggccttggcaattgtatcatagcgtccgagatgtgtattgcgtattgtcgcgaacgtggtgtagatttccgcttggccaacaatggagatgattgtgtcatcttcttgaataagcgggatcttgccgtgttcagcgacggcctctcattgtggttcagggagatgggattcaacatggtagtggaggagcccgtatacgagctggaggaggttgtgttttgtcaggcacaacctgtcttcgacgggcaatcctgggtcatggttcgtgaccccaggtccgctatcgcgaaggattgtgtttccttgaagccgtggcgtaacgagaaagagtatcaaagctggatcaagtcagttgggatgtcggggcgcgccttagctggtggcatccccatctacaatgagttctattccagttttgttcaagctggtggtgcagcacgtcccttgtccatggaggacccatccgttggtggtggtctctattggatgtctaagggtatgcaccgccagggtttggccgtatcggaccaagcccgcctttcgttttggaaggcgtttggcatcgacgcacagatgcaactcgaactcgaaaaacattacgccaacaccattccgaaatttattcctgtagagaaagtagaagatcttggggacgtataccccacgatggactgcgactatctcaggatgcttcccccttgccagggttaa

SEQ ID NO: 589 - DNA, 6393 bp, Tomato brown rugose fruit virus
  source 1..6393: mol_type = other DNA
gtatttttgttttacaacatataccaacaacaacaaacaacaaacaacaacattacaattactatttacaactacaatggcatacacacagacagctaccacatccgctttgctcgacactgtccgaggtaacaataccttggtcaacgatcttgcgaagcggcgtctttatgacacagcggtcgacgagttcaacgctcgtgatcgcaggcccaaagtaaatttttccaaagtaataagtgaggaacagacgcttattgctactagggcatatccagaattccagataaccttctataatacgcagaacgccgtgcattcgcttgccggtggactacgatccttagaactggaatatctaatgatgcagatcccgtacggatcactcacatatgatataggtgggaattttgcatctcatctgttcaaaggacgggcatatgttcactgctgtatgcccaatcttgatgtccgcgacataatgcggcacgaaggccagaaagacagtatagaattatacctttccaggcttgagcggggcaacaaagttgtcccaaatttccaaaaggaagcttttgacagatacgctgaaacgccagacgaagttgtctgtcacagtaccttccaaacgtgtacgcaccagcaggtggaaaacacaggcagggtgtatgctattgcattgcacagtatatacgatatacctgctgatgaattcggagcggcacttttaaggaaaaatgtccatgtttgttacgccgccttccacttttccgagaatttacttctcgaagattcacacgtcaaccttgacgaaatcaacgcgtgtttttcgcgtgatggagacaagctgactttttctttcgcatctgagagcactttaaattattgtcatagttattctaatattttaaaatacgtgtgcaaaacttacttcccggcatctaatagagaggtctacatgaaggagtttttggtcaccagggttaacacctggttttgtaagttttctaggatagatacttttttattatacaagggggtagcccacaaaggtgtaaatagtgagcaattttacagcgcaatggaagatgcatggcactacaaaaagactcttgcaatgtgtaacagcgagaggattcttcttgaagattcctcatcggtcaattactggttcccaaaaatgagagatatggtcatagttcctctattcgacatatctctcgacaccagtaaaaggacccgcaaagaagtcttagtgtcaaaggattttgtattcacagttttaaatcacattcgcacttatcaagccaaggcacttacatactccaatgttttatcctttgtcgaatcaattcgttcaagggtaattatcaacggagtgactgccaggtctgagtgggatgttgacaaatctcttttgcaatccttgtccatgacatttttcttgcatactaagcttgccgttttaaaagacgaattgttaatcagcaagtttagtttggggccaaaatcagtaagccagcatgtatgggatgagatttccctggcttttggaaacgcatttccatcgatcaaggagagactgctaaatcggaaactaattaaagtgtcgggagacgcattagaaatcagggtgcctgatttatatgtgacttttcacgatagattagtgactgagtacaaaacatcggtggatatgccagtgcttgatatcagaaagagaatggaggagactgaggttatgtacaatgcattgtctgagctatctgtgctcaaggagtcggacaagttcgacgttgatgttttttcccggatgtgccagactttggaggtagacccaatgactgcagcaaaggttattgtggcagtgatgagcaacgagagcggactgactcttacattcgaacagccaactgaagcaaatgtcgcattggcacttaaagattcagaaaaagcctctgagggtgcactagtggttacttctagagatgttgaagaaccatccatgaagggttcaatggcaagaggagagttacaattggccggtctgtctggagaccaaccagagtcttcctatactcggaacgaggaaatagagtcattagagcaattccacatggcaacggctagttcgttaattcggaaacagatgagttcgattgtgtacacgggccccattaaagttcagcaaatgaaaaactttattgatagcctggtagcatcactctctgctgcggtgtcgaacctagtcaagatcctaaaggatacagctgctatagatctcgaaacccgtcagaagtttggagtcttagatgttgcgaccaaaagatggttaattaaacctttagccaagaatcacgcatggggcgttattgaaacacatgctaggaagtaccacgttgcacttttggagtatgatgagcatggagtggtaacttgcgacagttggagaagggtggccgtgagttctgagtcaatggtttattctgatatggcaaagctcagaacactgaggagattattaagagatggtgagcctcatgtcagcagtgctaaagtcgtcctagttgacggtgtcccgggttgtggaaagacaaaagagattctctcgaaagtaaattttgaggaagatctaatcttagtaccgggtaagcaggctgctgaaatgataaagaggcgtgctaatgcgtcaggaataattcaagccacaagagataatgttcgtactgttgattcatttataatgaattacggtaaaggaacacgctgtcagttcaaaaggttatttatcgacgaaggtctgatgttgcacactggttgtgtgaattttcttgtttctatgtctctgtgcgaaattgcatatgtttatggagacacacaacaaattccatacatcaacagagtatccggttttccgtaccctgcacattttgcaaaaatagaggttgatgaggtggaaactcgcagaactacgctgcgttgtccagccgacattacccactatcttaacagaaggtacgaaggatatgtcatgtgtacatcgtcggttaaaaagtcagtttctcaggaaatggtgagcggggccgcaatgatcaatcctgtatctaagccattgaatgggaaagttttgactttcactcagtctgataaagaggcgctgctttctcgaggatatacggacgtccatacagtacatgaggtacaaggtgagacatatgcagatgtgtcgttggtcagattgactccgacacctgtatctatcatcgcaggagatagtccgcacgttctcgtagctttgtcaaggcatacccaaacattgaagtattacaccgtagtgatggatcctcttgtaagtataattagggatttagaaaaacttagttcttacttgttagatatgtataaagtagatgcagggacccaatagcaattacaggtagactccgtgtttaaaggttctaatctttttgttgcagcaccaaagactggagatatctcagatatgcaattttactatgataagtgtctcccaggtaatagcaccatgttaaataactatgatgctgttaccatgaggttgactgacatttctcttaatgtcaaagattgcatattggatttctctaagtctgtggctgcaccgaaggatccgatcaaaccactgattccgatggtacgaacggcggcagaaatgccacgccagactggactattggaaaatttggtggcgatgatcaaaagaaactttaattcaccggagttatcaggaataatcgacattgagaatactgcatctttagtagtagataaattttttgatagttacttgcttaaagaaaaaagaaaaccaaataaaaatgtttctttattttgtagagagtctctcaatagatggttagagaagcaggagcaagtgaccattggtcagcttgcagattttgattttgtggatcttcctgccgttgatcagtacaggcatatgattaaagcgcaacctaagcagaagctggatacatcaattcaaagcgaatatccggccttgcagacgattgtgtatcattcgaaaaagatcaacgcaatcttcggtcctttgttcagtgagctcacaaggcaaatgctcgaaagcatagactcaagtaagtttttgttctttacaaggaagacgccagctcaaattgaggatttcttcggagatctcgatagccatgtccctatggatatcttggagttggatatttcgaagtatgacaaatctcagaacgagttccactgtgcagtagagtatgaaatatggagaagacttggattagaagattttctgggagaagtttggaaacaaggccacaggaaaactactcttaaagattacacagctggtattaaaacgtgtttatggtaccagagaaagagtggggacgttacaacattcatcggtaatacggtgattattgctgcttgtttagcttccatgttgcccatggagaaaataatcaaaggtgcattttgcggagatgacagtttactatacttcccaaaaggttgtgagtttcctgacatacagcatacagccaaccttatgtggaatttcgaggctaagctattcagaaagcagtatggttatttctgtggaaggtacgtgatacatcatgacagagggtgtattgtttattatgaccctttgaagttgatttctaaacttggtgctaaacacatcaaggattgggatcacttagaagagttcagaagatccctttgtgatgttgcaaattcgttgaacaactgtgcgtattacacgcagttggacgacgctgtgagtgaggtccataaaaccgcacccccgggttcgtttgtatataaaagtttagttaaatatctgtccgataaggttctttttagaagtttgtttatagatggctcttgttaagggtaaagtcaatattaatgagttcatagacttgtcaaaatcagaaaaatttcttccgtctatgttcacacctgttaagagtgtcatgatctccaaggttgataagatattggttcatgaagatgaatctttgtccgaagtcaatttactcaaaggtgtaaaactcattgatggtggctatgtacatcttgctggtcttgtggtgacaggtgaatggaatttgccagataattgtcgtggtggtgtcagtgtctgtttggtcgataagagaatggagagagcggacgaggcaactcttgcttcatactataccgcagcggctaagaaaaggtttcagttcaaagtcgttccaaattacaacatcactaccaaggacgcagaaaaggcagtttggcaagtactagttaatattagaaatgttaaaattgctgcgggttactgtccgctgtcattagaatttgtgtcagtgtgtattgtttataaaaatattataaaactcggtttgagagagaaaattacgagcgtcacggatggagggcccatggaactatcagaagaagttgttgatgagttcatggaagaagtcccgatgtctgtaaggcttgcaaaatttcgttcgaagaccggaaaaaagtttagtagtaaaagtgagaataatagtggtaataataggccgaaaccagacaaaaaccaaaggaaggaaaagggtttaaaagttagggttgagaaggataatttaattgataatgaattggagacttacgtcgccgattcagattcgtattaaatatgtcttacacaatcgcaactccatcgcaatttgtgtttttgtcatcagcatgggccgaccctatagaattaataaatttatgtactaattcactaggtaatcagttccaaacacaacaagctagaacaaccgttcaacggcaatttagcgaagtgtggaaacctgtccctcaagtcactgttaggtttcctgacagtggttttaaggtgtataggtacaatgcggtactagatcctctagttactgctttgttaggagctttcgatactagaaataggattatagaagtcgaaaatcaggcgaacccgacaaccgccgaaacgttagacgctactcgtagagtagatgacgcaacggtggctataaggagcgctataaataatttagtagtagaattggtcaaaggaacaggtttgtacaatcagagcacatttgaaagtgcatccggtttacaatggtcctctgcacctgcatcttgagataatcgagatgcttaaataacagattgtgtctgcaaacacacgtggtacgtacgataacgtatagtgtttttccctccacttaaatcgaagggtagtgtcttggagcgcgcgggacaaatgtgtatggttcatacacatccgtaggcacgtaataaagcgagggattcgaattcccccggaacccccggaggggccca

SEQ ID NO: 590 - DNA, 11519 bp, Celery latent virus
  source 1..11519: mol_type = other DNA
aaaatttaaatttatgagcaagagaatatatacgattattgttgttttgtgctttcaggtttgctttcaaaatctccgaacacagcctacacaatcttcacataccttctcaacaaatccggcgatccccggtaccgacgctcttcaatttgaagaaaacgcaaacttaacttactctaccataaaatacaatattttaaagtttaatttaaattacaaacaatcaatcatgtctgtggtctctttcgggtcaatcacgagcatggacttcgatgctgcatgtctagcagctatgatcgaaacccctggtggctctattccaccaactccacaatcaccacccacttcaccagtggcggtgaaacaaaggaaaattttaaattttccaattgccaaaatcaggacaactcctgatgcatcttttgagatgtgtgtgaagttccccgagagcttcattgattccttctgtgctcaagcacagaaagaattaaaatattggcacgctgctattacgcagttgaaattctttggtggtgagacaccaaagactcttgaaaccttggtgaaccaaggtcaagctcacactcaccaagttattttaaacttggttaaaatccttgatagtgctccaaaagcaattcaaggaaagaaggagttggaaaatttcttccagctgagcccacatggaaacaattccaaagaaccaattgacgttagtcgaaaggtttatatggaaccgtgcaaaataagtccacgcaagcgacaagtgtgctcctgtgacaatgacgatgatgcacattatcattgttactattgtgatattgtgtgttcaagcaaaaatctattgcaagaacacgaaagggatttttgcgaggatgcacagtcagtgcaagcatttgggtataaacttgagagtccaaatgtctttgacccaccccatgtgacgcagcaaaggagtgttgcaccatctttgggaaaaactttggaatctcctgtgaaatctccagagcagtcaaagccaaacctggagaaaagtttcccactagtggaatcttccaccaacagtggcatgatcttctttggatcaatagctaccatggttccgtctcatattgaaaaatatgtgaggaattgtgaaactgagaatccgattgatgcagctgcatcaaatttggcgatgcaagaagctaaaagctctggcgctccttgtatagtagtgcatcataaggcactaccaggtggaaagaaagattttctttttcctcataactctcctcaagttgtgagaactgaaaccgaagagccaattgctggtaccattgatagaccaacaataaaacgtgctttatttacccgcattaagaagaaagcacaagaaatttgtgtgaacccagggggaaccatccagagaaaaacaaagcgatggttgcggccagcggaagttgcacaaattgtgcgagctacctctgatccacaacatccattgttcaaggtggacgttactcaaattattgaagttgttcatcctgtttataggactgaaagaactgaagttgtgcagcaatgcataacaaggggaacgtacaaattgatgtctaaagcccaacaacggaaggcacgagcaatgcgctcagctggaatgttagtgatcactgataacccaacaacgcattgggtatctgaacctcagaaaatgctagtggtaaaggaaaaactgagcacaacaaagcatgtgaaactccggaatgttgaagtgaatgctgaatctgaaatgttttggggaactaaaacaaaggagggaccctcgaaaacagccttaaagcgctgtaagcgtaacatcgatcgcttggctcttcttgatccgcaaatgggtgagtctgcgaatggtgaatgttggatgaacacctttaagcaccatttaaaagtggggagcattgatattcttccaaataaggttcgtttaccaaaccttaggtcggcattctcacgatggatacctttggttgattatgttgaaattttgaaatttcattgtaagtcacaaccaaagcttaaaagggttgtgatacctactccagttacttatctggaaggttctagatatcacattcatgttggttatagcaagaactgctcatggattacggtcgaacaactaattaggcaattgcagactctgttaacatcatccaaatatggagaacattttaagagagcaattgttggtggtgaaccggaagacaaattcacaccagtggttcctatagttgacgtggaaactgagagagctaaatctagcttggcaaaatggacaactgcgcaacagagatatatgggatctattagaacccgaatcaactcacaagcagaaaaacataaaatcgattcggaaaaaaagatctggataccaatgaggcacgacacgatggatatgttaactccaccatatcttttcgaaaatgggctgagaaacaacgaagttcaacaagtcggccaggttcttggagattctgtagatcgtgctggaaacagttcaggtcagagttctcaatgccaacaacaaaatgtggcgcttgcatccgaaggaaacaacgacaacgtgataaacgagagcgtgcgcagcattcaaaacttagttactgccaatatgcagttgcaagagcaatgcaaattgttgctcgcctcacacgaacaagctatcatggactccgtagaacacggaaacttggagattcagaagcacgatgtagaggtctcgcagaaaccatcaacgaggaaaagcgactcacagaggaatttgcaaaaattctcattgaagaaaatagtcgcctcagaagagatgtcgagaacattgggcagaggatggagaaaatctgtcacctcaatcggtgttccaattgtgagtgcttccattgcagaagctttaaatcaagtcgttcaaaggggaaatacttcctggcttgatgtaggcatttctggaacattgttgaagcaatgtactctttttgctacgagaacttttcaagcgtattgtagctacaaattagcacgaaacgtgctgacattaaccgtgggagaattgtatgataatgtgaaatcatacatcaactctataatgggttccacagatcctgaagtgactggtttcttgtcgcaagtacgtagcgcaccttcaatggtgaagatggccattttgctcacaatgtttgctatctcggtgaaattaatgagaaaattcttcaaggtgaagaataatggaactagctttactgtaagcggagagaatgtctctgcaagccagttgcgaatctcagcacaggctcaagctcgatcaactgacaacatgaccccaactgtaaagaagctttgtagcattcttggaatgattggtttggtttgttgttgttacgatagaacaacatgggcatatcaaaaggattggatggatgcttggatcacaagtatcacatatgccggtgcatctgatagtatttgggaatcaatttcccatccatttgaaacattgcataacattgcagtgagtggaggagatcgttcaccagaaactacagctcgtttggagcgaattttggctggtgcagggttgaacgcacaagcccaagcacttgatgaatttggagcgtctagctcagtgatgggtcagacactgcaaaacatattggatgaggttgaaagtacaaatgtgtcaatcgttagtgaaatgaaagcattgccacactaccaccgaaatgccactaccttcaatcaagcggctcgtgatttagtgactgaaccagatgcaacatatcaaatgttgttaacagcagcaactggtactggaaaatcaacgcttttcccagtgcacctaaggtcacaatctcaaaagagagtcttgctgctcattcctctcgttgcagcaacacatggagtttaccagcgacttaaaagtcaaagggtgaatgatattggttaccatgctgattcaatatctgaaaacccaaatgctaaattaatcatctcaacatatggacacatgtgtgtgaaattacttggtggtcaaaacccttttgatcaatttgattatattttagctgatgaatgtcatgttgtaacactcgagactgttacagtgatatcccatttactccaacagcgagaaatggcgacgtggaaaacagttttcatgacagcaacaccattcaacaatatcacacttaatagtgttgagacagaacagcctgtaatcatgcaacagaccgagcatttccacaaccccaaaagctttgtagattttctaaaagctggcggcactgaaagagtgcaaacatatgctaagggaggctgcatcgtattctgttctacccaaaaagaaactgaggaatcagcgaaagctcttaaagcgagtggggttattgcactcttttaccatgcctctaaccgattggaatgggattcctttgcaaagaaaaatgagcgaagcatgggacaattaaatttttatctctttgctacaaatgcactagaatctggtgtgacgatccctatgaaaagttgcgttgattttgtaactaaaatgcatccagtagttggtggagataggaagactattactatggctccaacttcaattagcattcaagagcaattgcagcgtcgaggtcgagttggacgaacttgtccaggtgggtatctatacacatcagttggaaccccgttgatgtataaacttgacccagattcatccattaagtacttgttgtactgttggaagagtggtatcaaatgttataaggaagcattaaatattcctgatgaatgcacgataacattcactaaagagaaaattggtgctatttggacacatgacacaccgccagttgttacagcagccttagtggataattttggtgcagtttacaggaatgcaaacttcttcttagcatcacatcgaagaaattatgtggaaattccacatacaactgatatgattctgccctcaactctctcgacatgggagaattttgaattggatgggaatgaagtatcagatggcacacgaatgagagtaccacaaaatcatttctttttccgaaacgaaagggtccaagagagttggttgaaattgcaagctgcaattcttactgaactaactgaagcagaagccactaagaagcgagatatagttatcgagaatctgatggcgcgtcgagtatcgggccatcctgcttcgaagcttgaaatagctagaatgataatggccaaacaacaagtggtacaacaagcaagagacacgaaacgtgttcgagaaacccttagtgagagtatatctgattactccggcatcttctcaaacttttctggaatattttcagttcaagaaagattgaaaaaggcttctatcaaggctaatgaggaattagatatggttattcaggaaaatgaatcccatattttatttctacaagacatgataaaagaaactcctgagatcatccctgatatggctttagaggagcagatccaacatatggaatatgcaaaagccatattggaaaatggttggatcagtgggaatcctcaagcaaagcttctcattatgcgcacaacgcataaaaattttcatgatcttgttacaaaaaccaaggatgggacctatcgcatgaaatcatatgtgcaacgcatgttcgattttgtgaagaaacatccattgttaatttttatgtccattatgatgggaacgtcattagcagcaggatacttcatgatgagtaaagactctgaagatgacgatgcaatagtgcaggacaaggttttcaaacgcaatgataaggcaatgctggaatggtgcttgagaggcaaagcatgtaaatgtgacgccacacacttcgaggcacagtatgtacttgattcacgtcattatagaactattctcgaagattgggtaaagttcccattgcgagggttccacaatatacaaatagtaaactatggcacagtgagcaaatatgcacgtgctctagctttcctatcagtttgtgcactcttagctaacccgactatggtgtataatagcgcagcacattccatggctggaaatagtgagtataatgagtcagtagcaaaatccctaatgcacaatattctaagagattggaatagagtcccgctcatagacttattggtaaaagggatagatggaagtgatgatcgttatgatcagtacatacatgaattatatacaagtggaggcctaattgcatttgaatcagacactggaaagtttgaaggaaaaatgtctattagtcaatatcgaaaggatgctgctaaaggacaaacaaaacgtagtgcagcttcacggtcacgtgaagaagatcattatgatccgagatcatcaggtcgactcaagagtgggatcagacgagcatatcgtcaattctataatattgaagattctgatgtgcaggaaattatcctcacaaacaagaaaggagctccaattcttaaaattgggagtcttgatgaattgaaccaacatgttgatcttctaaaattctcagatccagaattgtatgagttgtatttacatgctcgagataaattggatcttgacgaacctgaaagttcaagcggcttcactggaaagtggggtgactatgcggaagatgatgaattcatgaagatgatatcagctttagattcgttaacaaaacaagcttcggaggaagcatttataccagttcaagtgaaacttcgagatgggcgaactgtccaggcaaatgtcgcacgttattggcaaaaagattatccaactggaaaatctgtgaagcaatgggctcaaactacttgggctccaccacaattcacagctcttcgagaaagggtaggaaaagctcttgaactgattcctgaatcgcgaccaattcatcttcatggaaaagtcccaaatggaacacttatagagttccaagatgcaatgaaagatctgcacgagaagacagcagtcaaggctgtagctgaggctaaaatcggagatactcaatttgaggcggatccttctgatgtaacaagccgggttggtgtggttatggtgaaaacatcagcaaacgctgaatgggaatcatggaaccaatgtgttgctttgaataacatagtgatttttccccatcattacacgcttaaagatggtaataatttgagattcaagttttcatcaagtgatttcgaaagcacctgtcacattgtggatgggtacaatgggcttgacatggcttgggctccaattaacgttaaaattcgtggtttgaagaagaaagtttgtttaggcacgccgcggaatggatcttacctatggcatttttccatgattaatcaagggaaagatttgccagaggctcgtcttatgggatactcctctgtaacgaaagtacaagaagagtcgcacccatccttcgattggacacatacagtctcaacgcaagttgggaactgtggtggaccctttgttgataaacatggtgtcattgttggatatcacactggagcttttcaattgggacaatttaatactttcctgggattatcagcaccactaattgcacatctgacaaaattggatgtcaaaccaagtgcccagccccaatcaaagatgatttggagggaagtggatttttatcgatcaccaaattacttacccccaaccattaataaccaagagccaattccagaggagtggagatatccagaaggtaaatctgtttacccatgtgttgatccaggatggatgggttctcgtttggtgaagggatcaggttttcgtctcattggaaaaatgcaacgtcatgtggaatattcaacgaagatttcccttaatgagcattttgacatgtggatgtctcaagagaaaactcaaaatgagttaactaggctgaacaaaaatcgtgtagagaaagggttagagaaagctttcatcagtcacacgatagcagctcagaacaaggaagctgcaattaaagatacgagcaagtatgctagaacaacgttgggaacatattcagaacctttgttgaaaagagcgactgctctgacaatccaaatgctcgaggagcatattaagctatgtaaacgccaaccactggatttagtctatggggatatggaatggaacacagcatgtggagcccagtacaatggattgaaatcagcatttagggatcaagttgttggcatcgagaatatggatgcttatggtcaatactgctgggagcgtttcaacgttccaaccgatcaatacaaaccatgcatttggacaaattcattgaaggatgagttacgaccaattgaaaaagtgaaggagaataaaacgcgcactttcactgcagctccaatcgagtttgtaattggtgctaaacaagctgttgatgcattcaatcatcaattcatggatgcacatttgaagctaccacataccgttggtattaaccaatggtcagggggttggcacaaactatacaagaagttgtatggtaaaaactttgtgtactcaagtggagatggaagccggtttgactcaagtccgtgtttctatatgttcgatgccttgtacacaatacgtacatattttgcagatcctgaaatacaccaggttctggagaatatctacttggaggtttgtcacactccaatagtgttacacgatgggaatgttgtgatgaagaatcatggaaacaatagtggacaatgttctactgttgttgacaatagtctcattatgatgattctatgttgcgcctcttatctagagcacactccagctaccatgcattccctcgatgcaataaaaagccattggcatttttgtgtgaatggagatgattatattggaggaatgtcaccattgttagcaagccatttgactaaagagaagatggcaaaaaccttcagtgacttccagttcatatatgagtggtctgattattcaccatcattatttgaacaagattatatgagtttaaaattcataaacattgttgaacgaaaaggacaaacaactggacaacagttaattgctccatggcgtgaagcatcacgacaactctccactttggctcacacatcaagtggtgcacctgaaatcaaattacaagttgctctaaccgagagggtgaaagcatgggttgataaagatttatttgatttcataacagaatactgcagatggctcgtggagtatttcgatagatttacgaacacgcaagcatggaatgaagctaagaagttatggtgggatgaacaacaaattttcaaccattatttcagttttgaaagcatttgcaatgcgccatactcacaaattgtaaacgaaactcctgatgagttctttgctaatggtgtgagagagtcccgaccattgcgaatcctacgcgatggcatcaaatttggtgttgctgttacagcagctaattatctgggaccaagcgatcacgatgtacccatgattgcaaacacaatgcttaatgttgccaagataggtctcgcaaattcaacagccgagcggattgaccgtatgctatttgggaaggaaaaccctgaacatagtagagcggattcgctagttgttgtaaaaacagagcaaacagatgcgacgatctgtttgcgaactcactgcaaatgccaagcacagcacttcgatgggaaatatgagtgttgggtgagttccccatctgttgctataaaaatgtttgcaacattaaagccccggattctttccacaacgaaatttgttggagttaagtttctaccaaaaatactaagagctcatgtatgggccttatacctatctggattctcttgggaagaaacaatgcaaattgtgcaaagtcactaccctggcgagaaacagcaaagaaaagcggattggttcctacagcaactgctgaaagagctagtattgatattcaaagtgaaagggtcgaagtttattgagttgggagagcatgctcaagttcaagggaaaactcaactcgactctacacaagttgatatggatccaaattttaatgctgcagcttatgctgcaactcttcgaggaggaccgcactggggtacacataattcccaaggtctgtttgatgctattaaggtattaaaccccaatgcagcaaatgttgacattgggaatgcgcgaactgcggttcagcgcgagatgcagcggttgatagctgccgatgctccgcgacaacaaccaccaccacaagttggtggaggacaccaacaaccacctccagctggaggtcaaacgcaaggccagcctggtggttacacaccgagccaggcatttaccaataaatttggtaatataatggctgagcccgatgcccccctcgtgctcgactctcaagcaacaatgagggaagttgcccaaattgaggcagcttgggctcgtcttctagaggtgcaatctctagagggtcttggttccttctggaactacatgttttcctatgtgggaaacaatggcacctcatctggaggtgatcccagggattacatccctgcaggaaatgggcgagttacacttgcccaactaaagtccaaagctcaaggtgagcaatggcgacgttattggcgtagtcatgcgtcagacatgagggatttcttgaggcttcttcaagcttcagatagacctttgcctattcgttgggcaagaaacaatggcattaaagatgccaattacgagattgcattcgattttgcggatgcactcccagatctctcagctgcacaaatgtcaattattttagcagctaagaaccttgccgtaaggcgaggtcaaggccagatgcttaatgctggcaccaaggttggaggtcggtcaagaaccgaaacctatgaccaggctgtccgcgatgctgcggatgtccaattcccaggagcataattttattatgcaacacaacactctttttgactggggggtgatgtgtctggacttgttacagtctttttctttttcaagtgatgtggaatggaccttgaatcaaataacatttgattttggattcacatcattaatcttcaatagggtggatggccctccccttttggagtcgtacaggacgtatcctgttttatttagtaacatagcaataaacacaaaccaccatgtagatagccgtttcagtggtttggttgtgtgtttttcatttctgtcagaaaacttccaaaaatacaaaaatataaaatttttattttgtcattttggttcgttgggcccaagcgtcttgcatagcatgtcgttcattcctgaaacgagtcccccgatagtttcacaattagtgtaccggacaccttttaaaatcattttcacactttgtgatgaatttgtaaggcgtgtgcgcgtgaaaccgtggtttggacctttggaaagaggctacgctctgtaggtagttttcgatagaaaatggtttcccttaaggaaactgttttgttactttggagttccggcccccaaagtaaatttt

SEQ ID NO: 591 - DNA, 6552 bp, Black grass varicosavirus-like virus
  source 1..6552: mol_type = other DNA
cgccaatttcaaccctcccctacttccgattgtgatttttcatcgcatcgagacacccacaggtacagggtcctagtgtctctaacaccaactagaattaatggtattgattttatgtactaaattgtcatctgttctacaggagagacggcagagtttcccaagcacaagcgagatcaaggccacgcataagctcgacaacagagcgtgcaacatcacaagctcataaagctcaatggatactctggagcacgctgaagccaatgagctagaagacgatgattactttcttcctgacgaaggacctcttcatgatatgcacttggctagtgcaatcaacttggatcagatacaggagttgatgtatccagggactataaagtacaagatagatattccctattatttaagggatgagtacatgctgatagaaagtttgtgcaaaggagacaagatcaaaatggagcttggaatgttggctccatctttgaaactgtccaagcctggaggagaattgtcaaccatggatttacctgcatataaagaaataggaaaccttgtctgtcaggctttgaggaatagggacatcatgattcctatctccatgaatgatgtggcgctgaagctcccaggagtaatagtctacaggtcatggggtatagcatttgcagaattgttgaagattatatgcacaagagcagaagtgatgaggggagggtctcagcctgtatatcaaggcactggaattgaagcaggtgcagcacattgtcagtttcaagtcaacggcaattggtaccagatcgttgcgaggaagaatctctcaacactatatgacaggcaagagaatgtaatgtatataggaaatatacactcattgcttttgctaatggataccatcggacagaggatttgtttaatggttgccaatcagatagcagaactttatgatacacctggatgggttgatcaaggaaaaattgaccaaatattatcaactggagatgacattctggaagaaatgggaaatgatggatatgaaacaattgctatgtttgaatctcttgttataggaaaggtgttgagagcaactcccgatgacatcacagaatgccataagtttttgtacaactgtatggatgaggtagaaaacatgctactaaactctgctatgagaggaagaatcattgaacttgttcacagatggttggccatatttgacagtttatcgatcaaagagttatcaaatgtcttttgcttatatcgatgttggggacacccggttgtaaatatctatgaagggatggagaaagtttacgacatcggcactgaagagaaagaagttagcccatgggtagcaactgacatattgtgtcagttcagaaaaactttcttgataaattattacgagaagcatcactactatccaaacgtcttgatatcagaagaggtagaaaactcatatgttgctcaatgcattaagaagggttcttcaatagaggagatgtatcctacttatgatactaaggacttcttgggaatcgaaatccagaagatatgggacattccaataacatttgacctttgtcacattcttaatgataaagcagtatctccgaaccagaaggagctaacagacagtgttgtcaggtaccaaaacactacaggaggtcagaacagaagagggctccttagatggttgagaggaaagagcttaaactgcagagagttccttcgggagatagatcagaacgggctccctgaggatgagtgtatcattggaatgtacgagaaagagagagaaatcaagatcaaagccagaatgttttctctgatgtcagaaaggatgagatattacttcgttttgacggaagaccttatagctaagcacgtgctggagctatttcccgcaataacaatgaaagattcacaaaatgtactccaaaagaaattttggaccgttggcggaatgggaaaagactccacattcgacgttaatatcaacatcgatttttcgaagtggaattcgaacatgaggaatgaattaactcaacccatgttccaacagttggataagatcttcggatataccaatttgatatcaaggacccacgagatatttgaatcatcgtttgtatattcatcttcaggcaagtatgttcccactgtaaagtttggaaaactccaagaggatcctcctatggcatatcgtggacataagggaggctttgaagggttgagacaaaaaggatggactgtagctacagtatgtgccttatctgcaattgctgagagaagaaatgtgagaacaaaactgatgggacaaggagacaaccagatagttagaatactgatgcccacccagagatggaaatcaaatgagcttactatcaaagaaatgatccaaaatgccaaacagatccaaaaagcctttgtaaccgatatggagagaacatttgaagaggctaaattgcctatcaaggtgagagagacttgggcttctacgagactatttatgtatggaaagatgatcctacatgacggagatgcgatgccccaatggttcaaaaaagtgctgaggtcatacgctctaaccaatgagggtcaagtcactgtagcaggggtggtaggaactattgctactaacatggcttcagcggcaggattgagtgaaatgcctgatgtcatgtatctcatatttgtagcaatgactgagtggtcgctcggttacttgttagagtaccacccattcacacggaaatgcatcctaagagaacatgagtaccatgtaaagatccccggagcacatagaggaagagattatagggtgaggtcagttaacaagagaagattggtagtttctatgatcctgataccaacggcagctggaggaagtgtaacagttcctctccctggattcattatgaggggattccctgatcacgcctcagaggcttatgcctggatcaagatgcttgcggaagtaaagagtccatacaaaacaatgttaaagaactggtacactttcatcgggaatgattctatccaacctgatatgttgatccagagcccgtcatcaatcaacttcttgaagccgccaacacccagctttcaagggagaatgaacgtaagagagctcttattgtctggagaatttgatcagaaccagttcatcaaagaagcaggaacaatattgggagtctttgacaggaagaaggtctgctctgcgatgttaacagacccaatgaaccctttcataacctcagaggtttattccacttatgcccatgtgtacatagacggagtgataaaaagagtagaaaacaccagtactatcaagaagttggcccaaaaggtgaaaaccaagactcaagtcattaaggcaatgatgtacaatgaacataacttcatcatgttcataagttggagagcaatgaaaagaggtaccatcgactatgattgtgcaacccagcaagctagaatggctaggaatattggttggggaagaacaattactggtgtgaccacacctcatccagtagaattggggattggtcatatatgtaaaggtagacaagatgaatgtcctccaacggattacatttatgtcagaataaatgaaaagggagaatttgtcccttatcttgggtcaagaatcaagtgtaaagtcgtatcagagcaagatatagatgccagaagagagccactgattgctgtgggttcgcgtatatgcaggtactcgtcgtggcttggaattggcccaaatctgatggaaattgttgagaaaaacctagctgttgtctgtgacacatctgtctatgacaaatttatagacgatgatccaaagggactgttgtcatcaggatctattgatcatagattcactccagcaggagcatctgagggagttttcatcaactatgcaccacagattggttgtaatgtgtacatgtcgagcgattgtatgccgacctatggaagaggccagaccaactacactttgcacttccaggctctatattgttggctgcaatacatctcatcaaggagggctgaaagtgtattcatgcatcatcacatagagtgtgaagattgtgtcgtaccaactactgatgaagtccccgacatccagtgcccctttccctatttcgataatatatatcccccaagagtaagggacagcatatcaagagccttgggattcattgataggaaaggaggactagatattatgagcaatgtaagatcattgtgtcatgaagctgaaccaggcatgtttgatgttagacaattgcaaaagggagtgatgtggacactagcaataaagatcggatttcgattgtaccatgggggattattcgggtcagatgataccagagttgaggaccttcaggagtatcccaggatttactcatataaattatacagagataccttactggtcaatgtggcacatgtgatgatgatgcttgcagccatagagatggataaggcacctgatggtgaggaactcgcaaaagtcagaagaagagcaactgataaactgttgtcgaaacccattggaagcttcaaggggttaggaggattaactctaggaaggactgatgagaatccagataacagtcatttgtttatgactggctcattcccagaaactgtattctcaatattgaatacttccaagactgcattaatagagacaattggtcagattggacgcttatccatcgaaggaatgggccatcttcctgtggccaaaggttctctgtccaataagcagtttcgatttctgataatgatgagatgtttgttagaatgcaggaactctcattactttcaacactttcagaagatcccagaggacgaaccaggacatccagcggaccctcaaaatgacgtttatagaatgcttgtcaaaactcccgttctagatatgagtctagacaagatggtcaaatcacttgctgttattaacgaaagaaagactcttccgataatcgaatggaataacatctccttcgaatcaacagaagtgatctgcaggacaggaactcccaggtccatattcatcggaaatagaatgatcgttgagcaaaatagtagaagagagtacagagaagtaactcttccaacatctagcatttacaagtgggctgggatcttgtttcacaaacccttgaaaagacatatcattgtgttgggagatggaacaggaggaacctcactgttggtgaaaacattcaatcaagactctacagtgtacccttgctcctatttagaaacccataagattattccccaagatatggaatgtttaatgcctcaattgtctagaggatatgagggaatctccgggcgagttttgttaaatgttccagatgatatcaaggatcctctctggtcagaaagaatgtctagtgagataaatgacatgggcgttgaaaggacctctatagtctgcgatatagagaccgttgggctatgtgttctccttgatgcattcaggagtttacctcaaggagttcaagtagttatgaaaacctatgccaaagatatattgactaatatcatgtcaataatgggcttgaatcaggtagaggtgggattttctccgcatctgaaccagagcaaccatgaagtgtttctaatgggacacatctcacagaattcttttccagatcctgacatgatgatcaatcaaatggtaaagctttatggtaaggtgagagctgatccaagatccagaatcctggaggaaatgaggatgataaacaaagtattcaagccattaaagaatacgtctgtgtctctatctctagctcatataaataatctgggaattactatgaccagggagatattacaactggatggacttgagatctggggatatgcactgcaatttgtaaatcgtcattatgttgacccatctcatagagcatttcttgctgacaagaaaacgatgaacaggaaaagaaagagagatttgacaagggcattcaggatattgctaggagtggttgtgaatccaggatacctggatataaaacgcaaatggggtattagaactcccaaggaattcaaaccaagaggaatgaaccttatactagccagagattgtgatgatatgggtgtcaaattaaccaagaaggacaaattggcctctgaatgccttcattgcttttggaccaggaagatgaggaaagctcctctagatgcaccagatccaccgggggaagattggatggaaagtgcaacaagagttcgatcatttgccagcagtttatctgagcactcttctcatgattacatcaatgtcattgagacagagtagtaagttgttagtttccgtttgatgaagatggccagcagggtagaagaaaaaactatcaaacttggatacaagcagcagatcttatataaaacatagtatcattcgtaattattgcaccagagatgaatctaaatggcgaccctgtgacctatagcgtcattgataacgcggtcagattgcacgtggaacgcagcacgtatgggtttatgtttgaggcatgt

SEQ ID NO: 592 - DNA, 11988 bp, Maize suscal virus
  source 1..11988: mol_type = other DNA
caggagtgagtttgcgtctcggttaacgttgttgtagccgtttgagagacaacgtatcgattccaacgccatattcttctcatactcatcaatctcacttgtcctctgtccgcccagacaccaacacaatcgaacatttcctctgatggctgaacagattaatcacgcagctccgcccaggcgacagccaagatggggtgcttcagctatgtcgaacttcagggtaaagacgaaagatctggctacacctgactctgcaaacactccggcccacatgattgggggcgattctcttcagctggtcttcacagataaagaagcccttactggtagattctttcttacatgcctgactctcgccaatgatgaagctgttactgcaccgcagacaatagcctactatttgtctgccatggctattgtatttccttcaatgaagcctgatgcccaggactggattaagcacgcaggttatcgtgttgagctagtagagactgaagaagatctggctgagatggaagaaatccaaccatggaggccaactccagagctagctatgatgtttgggcagtctgtcttgattgtgttcaagaatatctctgctgcaaattatctgacgtacatcagaagcagagtgaaggcattaaaagcccatgtgggtgcgttttctgattctattgatggtggagaagtcttcagtctggctaaagcaatggttatcagagctgcacttggaaacaacgtggagttcaagaagaaaatactgaatctcatgctggccactcgcgaagtcgctggagcttttccggcagcttgcaattatgtgtgtggaatcctggaatggaatgagatgacggcgattgtcatcatatacaagatgctacttctcaccagctcgccggtcattaatgataaggagatcagagatgaggtgcttcacctggctgttgcgtatgaaaagatcaaccaatttgagtatccccagtactttcgcattatggcttccaggagtagagcaagggtcctagagaggcatcactatcaggtcctcaccactgtcgctcaagtggcccagaaggaccagacaccatctcttgcccagtttgttgccagtgttcctgaaaacaatcttactgtgattcggctggtcaatatccatcgtcgtttcctggccaggactgcagaagacatacatctgaaggctgcagcattcctcactgcagttgaagaagaagatgttgatgaagaactccctcctcgtgcttgattaggacagtgaggttatacccaacagacatctaagctggtctctgcgatggtctttggcggctgagcgcctttttgtttttggtctacctcatgctttctcttttgctcttggtggtgagcagtcatctattagtctgtgagtcgttggttaatgtctcagtctttaatgctactagaaaaaagtgagaaacgacgaacttgaaagaaaaaatggagcggaccagcaagctagagcggctcattgcgtctagaagtctctcattcggagaagctttgatcgctcaatctctactaaactgtgcaggtcgagatcacttcatgtcatgtctgggagacactgagattgtgtttgtctgtaaccaaggagttgacccatctctggtgagaagactaatcaccaattgcaccaagaggagtgttgtgcttccatttcgcttacttgagttggccacttgctcgatactcacatccgcgggttatgcagcagcaactctctgtagtttaatcaacaaaatcctagctgggcgtgaaaacaggtttcttggagtgatgtacatctcatctggcattaacttcaacggcttctcatctccaggtgttttggcatggaccctccagtactgcggaccgctgatggtgagatctcaaagcgccagaaagacgcttggtctagtgttcgttgactcccaggtgtacagaacttccacagcctgtgtctttgtagactgccagtgggaagaagagattctgagtctaaccacagtcatcgaacgagtcaactcacataccatgaattatctgagttctgttgaaggcaaagctattttcaagcgtgctgccctagctgtttgcgcctatttcaatagtgctgcagactggtgaaggtcctggtgtaggtgaataaagtaagaagatagaagactgtgcacatgtaggagattcccctaataagggtatgtgtgatatttgcatgtctaggtagactgaatgtattgtaagtttgtcgtgcagcccacagccaacctctgatggcagcttgttgtctaactttgagccttcttggcagttggactaagaaaaagtgagagaccaagcgattactgtgtttctcaaccttgcgaaaaccggagctagttgacagcacgcgtgagttcaaggcgcaaactgcaatggcgagcggaagtgggctttcaggtcttacgagtgaaggtgtcgaaagcagaggaactagtggggatttggaagagctgccaggaggagggctgtccagagaagaattcgccacaggaggacaaaatttattggacattgctactcaagaccctcggtttgaccaggtcagggcacaatttgctgacggtgacgatgaagagggagacgtccctaccaatgaaaacacgttcgtgttcgggaccttttctgggtctccatctgccacccagcatactcaagccagggtcagatcaaatccagtgtttaaaaagaagagtggaggtgcaaatccatctgcaagcagcagctcagcaccggtacctccggtcgcagggaacccttttgggtcaccgcagccatcctcaggattgcctgctcagcaaccgcagctagcacaacagcccccaatgagtgcggctgctgcagcaattgccaagatggaagagcagatccacgcaatggtggctcaagtggattccactttgccacacggctacccatcggtggagtcagtcacgactgacactgagcggctcgctgcaatgatagctgacactccttatctttgccttgagacaattgattcgaagcatgttgtggcagctggaccatgggtcgtcaagataagctctgcccagctcaccctctctgcatatgaccagctgatcttgtctatcgctgggaggtactattcttgcttaccgatggcaccagcagatgatctcacagcacgatttttgcacatctgctcgcgatacggaggaggagaccaattcagatcgcaagaggtcgatgtggggctgaatgcttactggaatgaactgtcaagcgagggagttatccatctgccgactcttgcttccaaggttctgcttactggtgaagctatcgcggcacctcactattcagattctatgactctcgcagatctgaccaagagtttagatgaggtctggcaagtatatccaccgattcggacagtttataacatgtgctaccaagttgcccatgaaggattaaagtttgttagtcctcttcatgatgccttcaggtttaatgatgctgcggctttttatgtggaccggatagcttgcggttctgactatattcgattggagcatgttgtcattacaccaagggcatccaacctccaattcaaacaacctgaaatgcctttagttgtcccggtggcaaacccgccaccagaagcggccacaggagcaggagacatagctgcgcagacagcagctgcaactgggctggtctctgaaaggcgcagaaattctgcaagaactggagctgcaacttcaggcgccactgtgccgggatctggcactggtgcttctttagccgctgtcaatcaagacccagcgcagcctacccctgctgaccctcatagtttgctgaaccaagggttgcctgcacggcagccacctgtgcgagacacctcgaccttcagagatggtgtagtcgacttcaacggtgttttggttaaagttcatcagttattgtcaaaccaggcctcccaagatgcaaagttagaccttattatgcagaggctcagcaacattgaagccatggtggatggggttgacaaggcatttgctgcagtgataacacgccactcccgccaggatctgactcaccgccagacagtcaacagcactctgctccagccaagttcttcagaggcccagaatctcgccagcgggtctactccccctgctccacctcagaccaatcaggtccttgaaatcctaaagatcctggaaggaggtcatgccgacgagctgacccttgagctggttgctcggttgaaggctcttattcttgagaccggaaataccagggccgctcagaacatcaccattgagtcgatcaagtttgagaatgctaggaagaggactgttcagaggatcaaaagtctcttccaccttaactaagtgatgacctggtcagggtgtgggaattgctgtttcactaagcaatgactggtcaaataaatcagtttgagtcagtcggtcctaggtcgtgagccaagtgggtcaagtcagtctagttcctcagttcaagtcgtcgagtcttgggttatgctttggcagcccttcaaaaactagaaaaaagtgagagacttgagaataactttgccatcgtcctcctgcaacagctgagcgcactcttctcgccatggagacctttctagatgaacaatttgatgatatgctatctgaatttgagcaagcacggctgtctcggtttccagcctcacatcacagctcggctttaacatattatcctcaacgccatattctgtcattaatgtctccaaactgtcctgtgaaaccaactccccttctgcgggcatactgtgatgcggtcaataaagtatctgatctcttggggggtgggtgtgatgccacagacaacccagctccagtatactcttatatcttctctcagacaacggcttcttcgccagcctattatgacccagactatgaggatccatacctgctggattccctgcgagcagcctcagatgctgtgcttgaagatattgaagctatagaatctcatcatccgggtttttcgctggataaccagaagttgcgactgctgcggaaagtctcttcacgtctccatgcttcctgcaaacagatatttgcggtgcgaagaatgttagaaaaagttagaaatcaaatccagaaatgtcacatcggggttgatcacaagcttatgccagcagtgagattaggaaatttgagtatacacactgttagagatctcatcttcgtagccggactgcaaccattccccatgcgcatccatatactaaattacgatcagtggctaatgatctacgacacagtctgttgccgtgcaatggtaaaggtggcaactttatggaacgaggaattacgcactgacaatatcccttcatgggagatcgtgtcctcagtttataaatggggcgacgcacttttaaccaactatggtgtctcagcgtatgctattataggagaatttgaatcaatagtgactggtgtcttaattacgttttctgacactgacacactaggacttggtgcctcatttgtcaactcaataatggagaacgcgcaagagcaaagcagagcttataatatacctgcgaatgagacattgaagctgatatcattgcttagaactgttgagtctgtgaactggctgtcagagttgttcggtttgagaaagcattggggaaatccaatggtggacgcgcgagcatcgggaaaagcagttcaggagaaggtagatgaggtattgccagttaaagggactgcacttgtgaaattattggcatctttcaacaggatggttacactgtcattcatctctcagcatgggcaatggccggacggttactacctctcgaactcaagagactgcccgctgaaaagagccttcgaatcacggtctacccgtatcccagagactgtggaagggcatcgtcatgaagactgggcatgctttgtgtttctacccaactgcattttagactcatatgaagatgacctggcattaatatcagataaagctgtcagtgtgtaccgcgaacacttagattcagtctatgtgcgggctctctgtaataagcagagtcagggcacggttgaggaagacagaaggttgatgttagagtacttgaggaaacagcatatgccaatactggatattttcaaaatagtaatgacagacgcagtgccgccccgatggatggccaactgtgctagcatgaaaggaacagaaatgaagcacttgaaggcccgaatttttgcggtgcttacatatgagatgagacagtactttgctgcgtcagaagacatactgaagaacaacttatttaagtataacccgcatcagactatgactatgtcagaaacagagctattgactcgactaaaatcattaactactcaattggatccaaacagtcaaagccggcagctgagtgtaatccatattgttgatttttcgaaatggaatttgagaatgagatacactaatacatgcttggtattcaaatctatagacgatttcttaggaactccaggcttgtttgagaattctcatccactcttcagtgatatgctcaacatggtttcagacccattcaatcctccagcgttaggagtagaagagacagaatctgacactatttggagaaatcatcacgcggggtgggagggtcagcgtcagaagggatggacaatcttaacatctgcactcttgtctgacctggagagaacaaccggagttcatagtgaaatatgcggccaaggtgataaccaggcactactaagcaaatttcctgtccccactatctataggaatccggaagaatggatcaagagtgatcctacggaggttaggaaggtgcttgacgacttctatttgagattagaaaaggaatgtgaagctgtaggtctgaagataaaaacagctgagacctgtcgaagtctttgttttttcaactacgggaaaagactctatttcaaaggcagtgaactatccatgaccctaaaacggttctcaaaaaacataacccagcctaatgactcatacccaacaacagaggctattcttaagacatatgagggttcatcttatgcagctggcctttatagccatccaagtctgctgccatactggatgagtaaattctctgtagcccatcaattattcaacagcttcactaacaaccagctttgtgcagaagccccagtacagatgatgtccacctttgggttcccgatcaactaccgactgatcagcacgttgatgaagatcccagcatctctaggtggcccacctcagcagtgtctggctgattatctgctacgcggccatccagatccactatgcactgatttagtcgggttgacattgaagtcaaaggccgggtgtgtgatctctaagaagataattcgtctagctcaatctggtaaatggtttagccaacgcactctgaccagagattccctaatcaaatctccttattctctgaacctcagggtcccattatcagttcgacaaccaattgaagaggctgtgctcccggctgtgcgagctcactgcaacaataacttagtgaaatctctatttgatagctcgatggatgacgacgagagatatattcttgactctttaggtcttatgaagccgttccatccgctcgtggccaacgatatttattcaaggactttaccaggaagaagacagatgtttatatcaggactggcgaataccacgagcttaggtcgcctgattaaagggaattctgcgtttcctctgatctacaaagtcatggatttggagatggagcagctaaaaagctggatagtccagctaacagagcttctcggtttacctgataatgatgatattattcttcctcatcatatattagcgcaacagctgcgcgagaaatcgtggaatacagtcattgagggcataacagttccacatccgttagaacagttcatgcttactctatcaaaatcggacgtctgcaccaacgactgttatacagtagaacctgagcatattgtattggttcaacactccgaggatgtggttgtgtctcccggtgtggaccgtgaccacatcacagcagcgcggtcaaagaaagggagcccctatcttggcagccatatcggagaaggcattgtacagaagcagcttatttgtctaaatccagatacttcctggagagatgtcattagactaaacactatcaagcgttgggtggctccagaggggtctaggctgaggttgtttatgaatggaattataagctcgcggactaacatatctcgtgcctacatagatctcgccacaggcgttccgagtagattgtcttacaaccaccgggccagcctgatggggtcaataaacagctgctctatcagttcgaccacaaacatgcacacaaggttgtacttatcctcgaacagaatgggagattattctcatggtttgaaaaattatcacatgcctttcgggcccacctttctctgttatcagacgctcgtctgcttgatcgggatcttttcacctgagaaatgggcattccctagaaatgtttatcatattcatgtcagagactctagggtgccgccggtgtacgatggcgggttagagctagaagacctaactgtccttgatctgaaaggacacccgcctaccatccttaggtgcttagcctccaaactggtattcgaagcagcaccaggatatgcatcgttcggattttggtgtgagttcgaaacagcatcgaggactgatgcgaaatatgggtatgcccaacagctgacgggtggtttgttcattcaggagacggttgtaagagaatctataacacacgacaggattgggagctttgcatcgagaccggctgtcatatcaattggagacatctcattgatcgagccatctctattccttcgttccatcgcctggggtatgctgttgctcgcacctatgcatctgctgcatttcagaggcaaatatgcattcaaagtttcctgcgtggaatatgtcaatcttttcagccgagctttttggtcttcatttgaatccccaatgagcaacccccgaataattaggaagctcggaaagcatgtcgcgttgatgtctagtcatagtctaggtaggctagattccggcatcatcccagctctgcagataataatcgttgaagagatgtggtgtatcatacattcgatcgccacctatttccgtcgaggaggtgataaaccgaatatcccccccatctttgccccatcgggttctgctgccctactcctcacctcacgagtgatagaaatgatggtcactatacggctagtagttgggaactgcagcatcagtaagatagtagggttcccaagagatttctcggcaaatcttatgagtgtgccgcagccaatatctgccgcagctctgatcgtgatacaacatgacttcttagaattgcagcgtcacttgaaactgccattacgggacatggtgatacccagagtgttctcaacccattacccctgggttgatatcttaaggaagactgacagtgtggaggcagacgatgaagacccgcagaggcaattagtcctcccagtcgactttccgcagtgtgctaatgtagtagaatttcgtatccctgagaaccctgtgttggagactactccacaatgtgactgtaaaacgacacaaagaaagagagatttacatgatgaatgtttcttttcgctgagtgggaactatagcaaatcccacctcaaaattctggagttgatcttttcgttccacctgcctatagcaaatctctgcgtgcttggctctggcactggttctgaagcatgtgcgttaagtaattatctggactgcagacaggtttatgtgaattgctaccacaaactaactgacttctccccgcatgctgcttccacttatgttccgcctgcattcaggtctgatggtatagtgactaagctcgtctctccagcctctgctgtcctaagtctgtcagatctcacggacatcaggactgcggatgctatatatcagcacttaagaggtattgctacaactggtatcatttgcgatgcagagattccaagtgcagcaactcctttactctactcacagataatgcatacaatagtggcagttgtgaggaagaaagcctctatcaactgggtgttaatcaaagtgccgatcttctgtgttcataagcttcttggcctggcagctccactagctcaggccttccatagaatcatctttgcttatccagacttcgggaagcctcattcaagtttggtctatattgtcgctactattcgggctaaggcaactccaattgaagagaataggctgcctactgtaatgcttgaagacgagatgctcagagagatgttggcctctatcagcagtcagaaccattgtagattatatgagatgagggtagcggatagaataagtcggttaagccttaatctaacccttcctcaaagcttgactgtggcttcgaatcggtttgtgcaaggcctgatcctcactgaagacgaaatctccgacccggaacaagttataaaggtactgaaggctgtgaggcaagggttgttgacctcagcacagaaagtagttgaaactcatttccgagttcataatgaaatcacaatgccgaggtcagctgtcctctctgcggatttaggaacccttcacggacagttaaacaacacatacctgaaagtcgctaaatgtgatctgctgttagagctgttgcaccttattcatcctaccctcgaacagatcaagaatcgtgtgtacagctggttggctacagcccactcgtatagaatgagaaacaggaacttcaatgtctacatcaaccagaccagatttatatcacatgattctagatatttattcgaaatccttggacatcttatgaaaagatctgttcccacagttggactccccatccatatggattaccatttattcggatctaggacactgaggcctaagcaacttattgttccttgcccaataggcgtatgtcgaagtccatcaggtagaactagcaaatggaagtggcagaaacgaagtgagatacttggttgggcaatctcattaaccctcacaaatttaccgatagcagttgaggatcataatagcttttcgctggatttcctacacgaaaaaggcatcttagaagatgttcgcatgatggcctcattaaacccatcccgcatagaggtcccttacttctttaggcccaatgagatggccctcgatttgttggcgcatgaccggttgttccttgttgcgccgttgaattctttctcactactcagaagccgttacacaaccgttgagccatactttgttccttggtcgggggcccctttagcttggtgtctattttatctggaggagcggaaccaaattgatagcctgattgtggatgagatctgccttgatgatactctgtcggtcaacacttatgtcgacacagacagcatgtcctgtagatgcctgagctgcaaaacggaagaagtcttgggagagaggttttcgttaaataccaacgatctggatttcctgtgttctcttggatctatagagacagtctatgattctgagcatgctttgtaggggcttatcgctcgcagggactaataaaaagtgagtatgtgtaagctgagccaaagactgtatcgccagttttatctaaaagtttattgtgaacttaatttaaagttcctatctgttcccatttaataccattaagaatgtggtcccagctcacctcttgtctagtccaattaagctgcagattgtgttgggtatgacataggacatatgggagtgacaaagttgaggtaataggagaataaaagtggaatcgacagtagtatcggcttgtacaacgttgagcgagacgcaaactcactcctg

SEQ ID NO: 593 - DNA, 76 bp, Tomato brown rugose fruit virus
  source 1..76: mol_type = other DNA
gtatttttgttttacaacatataccaacaacaacaaacaacaaacaacaacattacaattactatttacaactaca

SEQ ID NO: 594 - DNA, 13 bp, Celery latent virus
  source 1..13: mol_type = other DNA
aaaatttaaattt

SEQ ID NO: 595 - DNA, 235 bp, Black grass varicosavirus-like virus
  source 1..235: mol_type = other DNA
cgccaatttcaaccctcccctacttccgattgtgatttttcatcgcatcgagacacccacaggtacagggtcctagtgtctctaacaccaactagaattaatggtattgattttatgtactaaattgtcatctgttctacaggagagacggcagagtttcccaagcacaagcgagatcaaggccacgcataagctcgacaacagagcgtgcaacatcacaagctcataaagctca

SEQ ID NO: 596 - DNA, 142 bp, Maize suscal virus
  source 1..142: mol_type = other DNA
caggagtgagtttgcgtctcggttaacgttgttgtagccgtttgagagacaacgtatcgattccaacgccatattcttctcatactcatcaatctcacttgtcctctgtccgcccagacaccaacacaatcgaacatttcct

SEQ ID NO: 597 - DNA, 200 bp, Tomato brown rugose fruit virus
  source 1..200: mol_type = other DNA
gataatcgagatgcttaaataacagattgtgtctgcaaacacacgtggtacgtacgataacgtatagtgtttttccctccacttaaatcgaagggtagtgtcttggagcgcgcgggacaaatgtgtatggttcatacacatccgtaggcacgtaataaagcgagggattcgaattcccccggaacccccggaggggccca

SEQ ID NO: 598 - DNA, 583 bp, Celery latent virus
  source 1..583: mol_type = other DNA
ttttattatgcaacacaacactctttttgactggggggtgatgtgtctggacttgttacagtctttttctttttcaagtgatgtggaatggaccttgaatcaaataacatttgattttggattcacatcattaatcttcaatagggtggatggccctccccttttggagtcgtacaggacgtatcctgttttatttagtaacatagcaataaacacaaaccaccatgtagatagccgtttcagtggtttggttgtgtgtttttcatttctgtcagaaaacttccaaaaatacaaaaatataaaatttttattttgtcattttggttcgttgggcccaagcgtcttgcatagcatgtcgttcattcctgaaacgagtcccccgatagtttcacaattagtgtaccggacaccttttaaaatcattttcacactttgtgatgaatttgtaaggcgtgtgcgcgtgaaaccgtggtttggacctttggaaagaggctacgctctgtaggtagttttcgatagaaaatggtttcccttaaggaaactgttttgttactttggagttccggcccccaaagtaaatttt

SEQ ID NO: 599 - DNA, 221 bp, Black grass varicosavirus-like virus
  source 1..221: mol_type = other DNA
taagttgttagtttccgtttgatgaagatggccagcagggtagaagaaaaaactatcaaacttggatacaagcagcagatcttatataaaacatagtatcattcgtaattattgcaccagagatgaatctaaatggcgaccctgtgacctatagcgtcattgataacgcggtcagattgcacgtggaacgcagcacgtatgggtttatgtttgaggcatgt

SEQ ID NO: 600 - DNA, 303 bp, Maize suscal virus
  source 1..303: mol_type = other DNA
gggcttatcgctcgcagggactaataaaaagtgagtatgtgtaagctgagccaaagactgtatcgccagttttatctaaaagtttattgtgaacttaatttaaagttcctatctgttcccatttaataccattaagaatgtggtcccagctcacctcttgtctagtccaattaagctgcagattgtgttgggtatgacataggacatatgggagtgacaaagttgaggtaataggagaataaaagtggaatcgacagtagtatcggcttgtacaacgttgagcgagacgcaaactcactcctg

SEQ ID NO: 601 - protein, 1615 aa, Tomato brown rugose fruit virus
MAYTQTATTSALLDTVRGNNTLVNDLAKRRLYDTAVDEFNARDRRPKVNFSKVISEEQTLIATRAYPEFQITFYNTQNAVHSLAGGLRSLELEYLMMQIPYGSLTYDIGGNFASHLFKGRAYVHCCMPNLDVRDIMRHEGQKDSIELYLSRLERGNKVVPNFQKEAFDRYAETPDEVVCHSTFQTCTHQQVENTGRVYAIALHSIYDIPADEFGAALLRKNVHVCYAAFHFSENLLLEDSHVNLDEINACFSRDGDKLTFSFASESTLNYCHSYSNILKYVCKTYFPASNREVYMKEFLVTRVNTWFCKFSRIDTFLLYKGVAHKGVNSEQFYSAMEDAWHYKKTLAMCNSERILLEDSSSVNYWFPKMRDMVIVPLFDISLDTSKRTRKEVLVSKDFVFTVLNHIRTYQAKALTYSNVLSFVESIRSRVIINGVTARSEWDVDKSLLQSLSMTFFLHTKLAVLKDELLISKFSLGPKSVSQHVWDEISLAFGNAFPSIKERLLNRKLIKVSGDALEIRVPDLYVTFHDRLVTEYKTSVDMPVLDIRKRMEETEVMYNALSELSVLKESDKFDVDVFSRMCQTLEVDPMTAAKVIVAVMSNESGLTLTFEQPTEANVALALKDSEKASEGALVVTSRDVEEPSMKGSMARGELQLAGLSGDQPESSYTRNEEIESLEQFHMATASSLIRKQMSSIVYTGPIKVQQMKNFIDSLVASLSAAVSNLVKILKDTAAIDLETRQKFGVLDVATKRWLIKPLAKNHAWGVIETHARKYHVALLEYDEHGVVTCDSWRRVAVSSESMVYSDMAKLRTLRRLLRDGEPHVSSAKVVLVDGVPGCGKTKEILSKVNFEEDLILVPGKQAAEMIKRRANASGIIQATRDNVRTVDSFIMNYGKGTRCQFKRLFIDEGLMLHTGCVNFLVSMSLCEIAYVYGDTQQIPYINRVSGFPYPAHFAKIEVDEVETRRTTLRCPADITHYLNRRYEGYVMCTSSVKKSVSQEMVSGAAMINPVSKPLNGKVLTFTQSDKEALLSRGYTDVHTVHEVQGETYADVSLVRLTPTPVSIIAGDSPHVLVALSRHTQTLKYYTVVMDPLVSIIRDLEKLSSYLLDMYKVDAGTQXQLQVDSVFKGSNLFVAAPKTGDISDMQFYYDKCLPGNSTMLNNYDAVTMRLTDISLNVKDCILDFSKSVAAPKDPIKPLIPMVRTAAEMPRQTGLLENLVAMIKRNFNSPELSGIIDIENTASLVVDKFFDSYLLKEKRKPNKNVSLFCRESLNRWLEKQEQVTIGQLADFDFVDLPAVDQYRHMIKAQPKQKLDTSIQSEYPALQTIVYHSKKINAIFGPLFSELTRQMLESIDSSKFLFFTRKTPAQIEDFFGDLDSHVPMDILELDISKYDKSQNEFHCAVEYEIWRRLGLEDFLGEVWKQGHRKTTLKDYTAGIKTCLWYQRKSGDVTTFIGNTVIIAACLASMLPMEKIIKGAFCGDDSLLYFPKGCEFPDIQHTANLMWNFEAKLFRKQYGYFCGRYVIHHDRGCIVYYDPLKLISKLGAKHIKDWDHLEEFRRSLCDVANSLNNCAYYTQLDDAVSEVHKTAPPGSFVYKSLVKYLSDKVLFRSLFIDGSC

SEQ ID NO: 602 - protein, 3640 aa, Celery latent virus
MSKRIYTIIVVLCFQVCFQNLRTQPTQSSHTFSTNPAIPGTDALQFEENANLTYSTIKYNILKFNLNYKQSIMSVVSFGSITSMDFDAACLAAMIETPGGSIPPTPQSPPTSPVAVKQRKILNFPIAKIRTTPDASFEMCVKFPESFIDSFCAQAQKELKYWHAAITQLKFFGGETPKTLETLVNQGQAHTHQVILNLVKILDSAPKAIQGKKELENFFQLSPHGNNSKEPIDVSRKVYMEPCKISPRKRQVCSCDNDDDAHYHCYYCDIVCSSKNLLQEHERDFCEDAQSVQAFGYKLESPNVFDPPHVTQQRSVAPSLGKTLESPVKSPEQSKPNLEKSFPLVESSTNSGMIFFGSIATMVPSHIEKYVRNCETENPIDAAASNLAMQEAKSSGAPCIVVHHKALPGGKKDFLFPHNSPQVVRTETEEPIAGTIDRPTIKRALFTRIKKKAQEICVNPGGTIQRKTKRWLRPAEVAQIVRATSDPQHPLFKVDVTQIIEVVHPVYRTERTEVVQQCITRGTYKLMSKAQQRKARAMRSAGMLVITDNPTTHWVSEPQKMLVVKEKLSTTKHVKLRNVEVNAESEMFWGTKTKEGPSKTALKRCKRNIDRLALLDPQMGESANGECWMNTFKHHLKVGSIDILPNKVRLPNLRSAFSRWIPLVDYVEILKFHCKSQPKLKRVVIPTPVTYLEGSRYHIHVGYSKNCSWITVEQLIRQLQTLLTSSKYGEHFKRAIVGGEPEDKFTPVVPIVDVETERAKSSLAKWTTAQQRYMGSIRTRINSQAEKHKIDSEKKIWIPMRHDTMDMLTPPYLFENGLRNNEVQQVGQVLGDSVDRAGNSSGQSSQCQQQNVALASEGNNDNVINESVRSIQNLVTANMQLQEQCKLLLASHEQAIMDSVEHGNLEIQKHDVEVSQKPSTRKSDSQRNLQKFSLKKIVASEEMSRTLGRGWRKSVTSIGVPIVSASIAEALNQVVQRGNTSWLDVGISGTLLKQCTLFATRTFQAYCSYKLARNVLTLTVGELYDNVKSYINSIMGSTDPEVTGFLSQVRSAPSMVKMAILLTMFAISVKLMRKFFKVKNNGTSFTVSGENVSASQLRISAQAQARSTDNMTPTVKKLCSILGMIGLVCCCYDRTTWAYQKDWMDAWITSITYAGASDSIWESISHPFETLHNIAVSGGDRSPETTARLERILAGAGLNAQAQALDEFGASSSVMGQTLQNILDEVESTNVSIVSEMKALPHYHRNATTFNQAARDLVTEPDATYQMLLTAATGTGKSTLFPVHLRSQSQKRVLLLIPLVAATHGVYQRLKSQRVNDIGYHADSISENPNAKLIISTYGHMCVKLLGGQNPFDQFDYILADECHVVTLETVTVISHLLQQREMATWKTVFMTATPFNNITLNSVETEQPVIMQQTEHFHNPKSFVDFLKAGGTERVQTYAKGGCIVFCSTQKETEESAKALKASGVIALFYHASNRLEWDSFAKKNERSMGQLNFYLFATNALESGVTIPMKSCVDFVTKMHPVVGGDRKTITMAPTSISIQEQLQRRGRVGRTCPGGYLYTSVGTPLMYKLDPDSSIKYLLYCWKSGIKCYKEALNIPDECTITFTKEKIGAIWTHDTPPVVTAALVDNFGAVYRNANFFLASHRRNYVEIPHTTDMILPSTLSTWENFELDGNEVSDGTRMRVPQNHFFFRNERVQESWLKLQAAILTELTEAEATKKRDIVIENLMARRVSGHPASKLEIARMIMAKQQVVQQARDTKRVRETLSESISDYSGIFSNFSGIFSVQERLKKASIKANEELDMVIQENESHILFLQDMIKETPEIIPDMALEEQIQHMEYAKAILENGWISGNPQAKLLIMRTTHKNFHDLVTKTKDGTYRMKSYVQRMFDFVKKHPLLIFMSIMMGTSLAAGYFMMSKDSEDDDAIVQDKVFKRNDKAMLEWCLRGKACKCDATHFEAQYVLDSRHYRTILEDWVKFPLRGFHNIQIVNYGTVSKYARALAFLSVCALLANPTMVYNSAAHSMAGNSEYNESVAKSLMHNILRDWNRVPLIDLLVKGIDGSDDRYDQYIHELYTSGGLIAFESDTGKFEGKMSISQYRKDAAKGQTKRSAASRSREEDHYDPRSSGRLKSGIRRAYRQFYNIEDSDVQEIILTNKKGAPILKIGSLDELNQHVDLLKFSDPELYELYLHARDKLDLDEPESSSGFTGKWGDYAEDDEFMKMISALDSLTKQASEEAFIPVQVKLRDGRTVQANVARYWQKDYPTGKSVKQWAQTTWAPPQFTALRERVGKALELIPESRPIHLHGKVPNGTLIEFQDAMKDLHEKTAVKAVAEAKIGDTQFEADPSDVTSRVGVVMVKTSANAEWESWNQCVALNNIVIFPHHYTLKDGNNLRFKFSSSDFESTCHIVDGYNGLDMAWAPINVKIRGLKKKVCLGTPRNGSYLWHFSMINQGKDLPEARLMGYSSVTKVQEESHPSFDWTHTVSTQVGNCGGPFVDKHGVIVGYHTGAFQLGQFNTFLGLSAPLIAHLTKLDVKPSAQPQSKMIWREVDFYRSPNYLPPTINNQEPIPEEWRYPEGKSVYPCVDPGWMGSRLVKGSGFRLIGKMQRHVEYSTKISLNEHFDMWMSQEKTQNELTRLNKNRVEKGLEKAFISHTIAAQNKEAAIKDTSKYARTTLGTYSEPLLKRATALTIQMLEEHIKLCKRQPLDLVYGDMEWNTACGAQYNGLKSAFRDQVVGIENMDAYGQYCWERFNVPTDQYKPCIWTNSLKDELRPIEKVKENKTRTFTAAPIEFVIGAKQAVDAFNHQFMDAHLKLPHTVGINQWSGGWHKLYKKLYGKNFVYSSGDGSRFDSSPCFYMFDALYTIRTYFADPEIHQVLENIYLEVCHTPIVLHDGNVVMKNHGNNSGQCSTVVDNSLIMMILCCASYLEHTPATMHSLDAIKSHWHFCVNGDDYIGGMSPLLASHLTKEKMAKTFSDFQFIYEWSDYSPSLFEQDYMSLKFINIVERKGQTTGQQLIAPWREASRQLSTLAHTSSGAPEIKLQVALTERVKAWVDKDLFDFITEYCRWLVEYFDRFTNTQAWNEAKKLWWDEQQIFNHYFSFESICNAPYSQIVNETPDEFFANGVRESRPLRILRDGIKFGVAVTAANYLGPSDHDVPMIANTMLNVAKIGLANSTAERIDRMLFGKENPEHSRADSLVVVKTEQTDATICLRTHCKCQAQHFDGKYECWVSSPSVAIKMFATLKPRILSTTKFVGVKFLPKILRAHVWALYLSGFSWEETMQIVQSHYPGEKQQRKADWFLQQLLKELVLIFKVKGSKFIELGEHAQVQGKTQLDSTQVDMDPNFNAAAYAATLRGGPHWGTHNSQGLFDAIKVLNPNAANVDIGNARTAVQREMQRLIAADAPRQQPPPQVGGGHQQPPPAGGQTQGQPGGYTPSQAFTNKFGNIMAEPDAPLVLDSQATMREVAQIEAAWARLLEVQSLEGLGSFWNYMFSYVGNNGTSSGGDPRDYIPAGNGRVTLAQLKSKAQGEQWRRYWRSHASDMRDFLRLLQASDRPLPIRWARNNGIKDANYEIAFDFADALPDLSAAQMSIILAAKNLAVRRGQGQMLNAGTKVGGRSRTETYDQAVRDAADVQFPGA

SEQ ID NO: 603 - protein, 2031 aa, Black grass varicosavirus-like virus
MDTLEHAEANELEDDDYFLPDEGPLHDMHLASAINLDQIQELMYPGTIKYKIDIPYYLRDEYMLIESLCKGDKIKMELGMLAPSLKLSKPGGELSTMDLPAYKEIGNLVCQALRNRDIMIPISMNDVALKLPGVIVYRSWGIAFAELLKIICTRAEVMRGGSQPVYQGTGIEAGAAHCQFQVNGNWYQIVARKNLSTLYDRQENVMYIGNIHSLLLLMDTIGQRICLMVANQIAELYDTPGWVDQGKIDQILSTGDDILEEMGNDGYETIAMFESLVIGKVLRATPDDITECHKFLYNCMDEVENMLLNSAMRGRIIELVHRWLAIFDSLSIKELSNVFCLYRCWGHPVVNIYEGMEKVYDIGTEEKEVSPWVATDILCQFRKTFLINYYEKHHYYPNVLISEEVENSYVAQCIKKGSSIEEMYPTYDTKDFLGIEIQKIWDIPITFDLCHILNDKAVSPNQKELTDSVVRYQNTTGGQNRRGLLRWLRGKSLNCREFLREIDQNGLPEDECIIGMYEKEREIKIKARMFSLMSERMRYYFVLTEDLIAKHVLELFPAITMKDSQNVLQKKFWTVGGMGKDSTFDVNINIDFSKWNSNMRNELTQPMFQQLDKIFGYTNLISRTHEIFESSFVYSSSGKYVPTVKFGKLQEDPPMAYRGHKGGFEGLRQKGWTVATVCALSAIAERRNVRTKLMGQGDNQIVRILMPTQRWKSNELTIKEMIQNAKQIQKAFVTDMERTFEEAKLPIKVRETWASTRLFMYGKMILHDGDAMPQWFKKVLRSYALTNEGQVTVAGVVGTIATNMASAAGLSEMPDVMYLIFVAMTEWSLGYLLEYHPFTRKCILREHEYHVKIPGAHRGRDYRVRSVNKRRLVVSMILIPTAAGGSVTVPLPGFIMRGFPDHASEAYAWIKMLAEVKSPYKTMLKNWYTFIGNDSIQPDMLIQSPSSINFLKPPTPSFQGRMNVRELLLSGEFDQNQFIKEAGTILGVFDRKKVCSAMLTDPMNPFITSEVYSTYAHVYIDGVIKRVENTSTIKKLAQKVKTKTQVIKAMMYNEHNFIMFISWRAMKRGTIDYDCATQQARMARNIGWGRTITGVTTPHPVELGIGHICKGRQDECPPTDYIYVRINEKGEFVPYLGSRIKCKVVSEQDIDARREPLIAVGSRICRYSSWLGIGPNLMEIVEKNLAVVCDTSVYDKFIDDDPKGLLSSGSIDHRFTPAGASEGVFINYAPQIGCNVYMSSDCMPTYGRGQTNYTLHFQALYCWLQYISSRRAESVFMHHHIECEDCVVPTTDEVPDIQCPFPYFDNIYPPRVRDSISRALGFIDRKGGLDIMSNVRSLCHEAEPGMFDVRQLQKGVMWTLAIKIGFRLYHGGLFGSDDTRVEDLQEYPRIYSYKLYRDTLLVNVAHVMMMLAAIEMDKAPDGEELAKVRRRATDKLLSKPIGSFKGLGGLTLGRTDENPDNSHLFMTGSFPETVFSILNTSKTALIETIGQIGRLSIEGMGHLPVAKGSLSNKQFRFLIMMRCLLECRNSHYFQHFQKIPEDEPGHPADPQNDVYRMLVKTPVLDMSLDKMVKSLAVINERKTLPIIEWNNISFESTEVICRTGTPRSIFIGNRMIVEQNSRREYREVTLPTSSIYKWAGILFHKPLKRHIIVLGDGTGGTSLLVKTFNQDSTVYPCSYLETHKIIPQDMECLMPQLSRGYEGISGRVLLNVPDDIKDPLWSERMSSEINDMGVERTSIVCDIETVGLCVLLDAFRSLPQGVQVVMKTYAKDILTNIMSIMGLNQVEVGFSPHLNQSNHEVFLMGHISQNSFPDPDMMINQMVKLYGKVRADPRSRILEEMRMINKVFKPLKNTSVSLSLAHINNLGITMTREILQLDGLEIWGYALQFVNRHYVDPSHRAFLADKKTMNRKRKRDLTRAFRILLGVVVNPGYLDIKRKWGIRTPKEFKPRGMNLILARDCDDMGVKLTKKDKLASECLHCFWTRKMRKAPLDAPDPPGEDWMESATRVRSFASSLSEHSSHDYINVIETE

SEQ ID NO: 604 - protein, 2338 aa, Maize suscal virus
METFLDEQFDDMLSEFEQARLSRFPASHHSSALTYYPQRHILSLMSPNCPVKPTPLLRAYCDAVNKVSDLLGGGCDATDNPAPVYSYIFSQTTASSPAYYDPDYEDPYLLDSLRAASDAVLEDIEAIESHHPGFSLDNQKLRLLRKVSSRLHASCKQIFAVRRMLEKVRNQIQKCHIGVDHKLMPAVRLGNLSIHTVRDLIFVAGLQPFPMRIHILNYDQWLMIYDTVCCRAMVKVATLWNEELRTDNIPSWEIVSSVYKWGDALLTNYGVSAYAIIGEFESIVTGVLITFSDTDTLGLGASFVNSIMENAQEQSRAYNIPANETLKLISLLRTVESVNWLSELFGLRKHWGNPMVDARASGKAVQEKVDEVLPVKGTALVKLLASFNRMVTLSFISQHGQWPDGYYLSNSRDCPLKRAFESRSTRIPETVEGHRHEDWACFVFLPNCILDSYEDDLALISDKAVSVYREHLDSVYVRALCNKQSQGTVEEDRRLMLEYLRKQHMPILDIFKIVMTDAVPPRWMANCASMKGTEMKHLKARIFAVLTYEMRQYFAASEDILKNNLFKYNPHQTMTMSETELLTRLKSLTTQLDPNSQSRQLSVIHIVDFSKWNLRMRYTNTCLVFKSIDDFLGTPGLFENSHPLFSDMLNMVSDPFNPPALGVEETESDTIWRNHHAGWEGQRQKGWTILTSALLSDLERTTGVHSEICGQGDNQALLSKFPVPTIYRNPEEWIKSDPTEVRKVLDDFYLRLEKECEAVGLKIKTAETCRSLCFFNYGKRLYFKGSELSMTLKRFSKNITQPNDSYPTTEAILKTYEGSSYAAGLYSHPSLLPYWMSKFSVAHQLFNSFTNNQLCAEAPVQMMSTFGFPINYRLISTLMKIPASLGGPPQQCLADYLLRGHPDPLCTDLVGLTLKSKAGCVISKKIIRLAQSGKWFSQRTLTRDSLIKSPYSLNLRVPLSVRQPIEEAVLPAVRAHCNNNLVKSLFDSSMDDDERYILDSLGLMKPFHPLVANDIYSRTLPGRRQMFISGLANTTSLGRLIKGNSAFPLIYKVMDLEMEQLKSWIVQLTELLGLPDNDDIILPHHILAQQLREKSWNTVIEGITVPHPLEQFMLTLSKSDVCTNDCYTVEPEHIVLVQHSEDVVVSPGVDRDHITAARSKKGSPYLGSHIGEGIVQKQLICLNPDTSWRDVIRLNTIKRWVAPEGSRLRLFMNGIISSRTNISRAYIDLATGVPSRLSYNHRASLMGSINSCSISSTTNMHTRLYLSSNRMGDYSHGLKNYHMPFGPTFLCYQTLVCLIGIFSPEKWAFPRNVYHIHVRDSRVPPVYDGGLELEDLTVLDLKGHPPTILRCLASKLVFEAAPGYASFGFWCEFETASRTDAKYGYAQQLTGGLFIQETVVRESITHDRIGSFASRPAVISIGDISLIEPSLFLRSIAWGMLLLAPMHLLHFRGKYAFKVSCVEYVNLFSRAFWSSFESPMSNPRIIRKLGKHVALMSSHSLGRLDSGIIPALQIIIVEEMWCIIHSIATYFRRGGDKPNIPPIFAPSGSAALLLTSRVIEMMVTIRLVVGNCSISKIVGFPRDFSANLMSVPQPISAAALIVIQHDFLELQRHLKLPLRDMVIPRVFSTHYPWVDILRKTDSVEADDEDPQRQLVLPVDFPQCANVVEFRIPENPVLETTPQCDCKTTQRKRDLHDECFFSLSGNYSKSHLKILELIFSFHLPIANLCVLGSGTGSEACALSNYLDCRQVYVNCYHKLTDFSPHAASTYVPPAFRSDGIVTKLVSPASAVLSLSDLTDIRTADAIYQHLRGIATTGIICDAEIPSAATPLLYSQIMHTIVAVVRKKASINWVLIKVPIFCVHKLLGLAAPLAQAFHRIIFAYPDFGKPHSSLVYIVATIRAKATPIEENRLPTVMLEDEMLREMLASISSQNHCRLYEMRVADRISRLSLNLTLPQSLTVASNRFVQGLILTEDEISDPEQVIKVLKAVRQGLLTSAQKVVETHFRVHNEITMPRSAVLSADLGTLHGQLNNTYLKVAKCDLLLELLHLIHPTLEQIKNRVYSWLATAHSYRMRNRNFNVYINQTRFISHDSRYLFEILGHLMKRSVPTVGLPIHMDYHLFGSRTLRPKQLIVPCPIGVCRSPSGRTSKWKWQKRSEILGWAISLTLTNLPIAVEDHNSFSLDFLHEKGILEDVRMMASLNPSRIEVPYFFRPNEMALDLLAHDRLFLVAPLNSFSLLRSRYTTVEPYFVPWSGAPLAWCLFYLEERNQIDSLIVDEICLDDTLSVNTYVDTDSMSCRCLSCKTEEVLGERFSLNTNDLDFLCSLGSIETVYDSEHAL

SEQ ID NO: 605 - DNA, 4845 bp, Tomato brown rugose fruit virus
  source 1..4845: mol_type = other DNA
atggcatacacacagacagctaccacatccgctttgctcgacactgtccgaggtaacaataccttggtcaacgatcttgcgaagcggcgtctttatgacacagcggtcgacgagttcaacgctcgtgatcgcaggcccaaagtaaatttttccaaagtaataagtgaggaacagacgcttattgctactagggcatatccagaattccagataaccttctataatacgcagaacgccgtgcattcgcttgccggtggactacgatccttagaactggaatatctaatgatgcagatcccgtacggatcactcacatatgatataggtgggaattttgcatctcatctgttcaaaggacgggcatatgttcactgctgtatgcccaatcttgatgtccgcgacataatgcggcacgaaggccagaaagacagtatagaattatacctttccaggcttgagcggggcaacaaagttgtcccaaatttccaaaaggaagcttttgacagatacgctgaaacgccagacgaagttgtctgtcacagtaccttccaaacgtgtacgcaccagcaggtggaaaacacaggcagggtgtatgctattgcattgcacagtatatacgatatacctgctgatgaattcggagcggcacttttaaggaaaaatgtccatgtttgttacgccgccttccacttttccgagaatttacttctcgaagattcacacgtcaaccttgacgaaatcaacgcgtgtttttcgcgtgatggagacaagctgactttttctttcgcatctgagagcactttaaattattgtcatagttattctaatattttaaaatacgtgtgcaaaacttacttcccggcatctaatagagaggtctacatgaaggagtttttggtcaccagggttaacacctggttttgtaagttttctaggatagatacttttttattatacaagggggtagcccacaaaggtgtaaatagtgagcaattttacagcgcaatggaagatgcatggcactacaaaaagactcttgcaatgtgtaacagcgagaggattcttcttgaagattcctcatcggtcaattactggttcccaaaaatgagagatatggtcatagttcctctattcgacatatctctcgacaccagtaaaaggacccgcaaagaagtcttagtgtcaaaggattttgtattcacagttttaaatcacattcgcacttatcaagccaaggcacttacatactccaatgttttatcctttgtcgaatcaattcgttcaagggtaattatcaacggagtgactgccaggtctgagtgggatgttgacaaatctcttttgcaatccttgtccatgacatttttcttgcatactaagcttgccgttttaaaagacgaattgttaatcagcaagtttagtttggggccaaaatcagtaagccagcatgtatgggatgagatttccctggcttttggaaacgcatttccatcgatcaaggagagactgctaaatcggaaactaattaaagtgtcgggagacgcattagaaatcagggtgcctgatttatatgtgacttttcacgatagattagtgactgagtacaaaacatcggtggatatgccagtgcttgatatcagaaagagaatggaggagactgaggttatgtacaatgcattgtctgagctatctgtgctcaaggagtcggacaagttcgacgttgatgttttttcccggatgtgccagactttggaggtagacccaatgactgcagcaaaggttattgtggcagtgatgagcaacgagagcggactgactcttacattcgaacagccaactgaagcaaatgtcgcattggcacttaaagattcagaaaaagcctctgagggtgcactagtggttacttctagagatgttgaagaaccatccatgaagggttcaatggcaagaggagagttacaattggccggtctgtctggagaccaaccagagtcttcctatactcggaacgaggaaatagagtcattagagcaattccacatggcaacggctagttcgttaattcggaaacagatgagttcgattgtgtacacgggccccattaaagttcagcaaatgaaaaactttattgatagcctggtagcatcactctctgctgcggtgtcgaacctagtcaagatcctaaaggatacagctgctatagatctcgaaacccgtcagaagtttggagtcttagatgttgcgaccaaaagatggttaattaaacctttagccaagaatcacgcatggggcgttattgaaacacatgctaggaagtaccacgttgcacttttggagtatgatgagcatggagtggtaacttgcgacagttggagaagggtggccgtgagttctgagtcaatggtttattctgatatggcaaagctcagaacactgaggagattattaagagatggtgagcctcatgtcagcagtgctaaagtcgtcctagttgacggtgtcccgggttgtggaaagacaaaagagattctctcgaaagtaaattttgaggaagatctaatcttagtaccgggtaagcaggctgctgaaatgataaagaggcgtgctaatgcgtcaggaataattcaagccacaagagataatgttcgtactgttgattcatttataatgaattacggtaaaggaacacgctgtcagttcaaaaggttatttatcgacgaaggtctgatgttgcacactggttgtgtgaattttcttgtttctatgtctctgtgcgaaattgcatatgtttatggagacacacaacaaattccatacatcaacagagtatccggttttccgtaccctgcacattttgcaaaaatagaggttgatgaggtggaaactcgcagaactacgctgcgttgtccagccgacattacccactatcttaacagaaggtacgaaggatatgtcatgtgtacatcgtcggttaaaaagtcagtttctcaggaaatggtgagcggggccgcaatgatcaatcctgtatctaagccattgaatgggaaagttttgactttcactcagtctgataaagaggcgctgctttctcgaggatatacggacgtccatacagtacatgaggtacaaggtgagacatatgcagatgtgtcgttggtcagattgactccgacacctgtatctatcatcgcaggagatagtccgcacgttctcgtagctttgtcaaggcatacccaaacattgaagtattacaccgtagtgatggatcctcttgtaagtataattagggatttagaaaaacttagttcttacttgttagatatgtataaagtagatgcagggacccaacaattacaggtagactccgtgtttaaaggttctaatctttttgttgcagcaccaaagactggagatatctcagatatgcaattttactatgataagtgtctcccaggtaatagcaccatgttaaataactatgatgctgttaccatgaggttgactgacatttctcttaatgtcaaagattgcatattggatttctctaagtctgtggctgcaccgaaggatccgatcaaaccactgattccgatggtacgaacggcggcagaaatgccacgccagactggactattggaaaatttggtggcgatgatcaaaagaaactttaattcaccggagttatcaggaataatcgacattgagaatactgcatctttagtagtagataaattttttgatagttacttgcttaaagaaaaaagaaaaccaaataaaaatgtttctttattttgtagagagtctctcaatagatggttagagaagcaggagcaagtgaccattggtcagcttgcagattttgattttgtggatcttcctgccgttgatcagtacaggcatatgattaaagcgcaacctaagcagaagctggatacatcaattcaaagcgaatatccggccttgcagacgattgtgtatcattcgaaaaagatcaacgcaatcttcggtcctttgttcagtgagctcacaaggcaaatgctcgaaagcatagactcaagtaagtttttgttctttacaaggaagacgccagctcaaattgaggatttcttcggagatctcgatagccatgtccctatggatatcttggagttggatatttcgaagtatgacaaatctcagaacgagttccactgtgcagtagagtatgaaatatggagaagacttggattagaagattttctgggagaagtttggaaacaaggccacaggaaaactactcttaaagattacacagctggtattaaaacgtgtttatggtaccagagaaagagtggggacgttacaacattcatcggtaatacggtgattattgctgcttgtttagcttccatgttgcccatggagaaaataatcaaaggtgcattttgcggagatgacagtttactatacttcccaaaaggttgtgagtttcctgacatacagcatacagccaaccttatgtggaatttcgaggctaagctattcagaaagcagtatggttatttctgtggaaggtacgtgatacatcatgacagagggtgtattgtttattatgaccctttgaagttgatttctaaacttggtgctaaacacatcaaggattgggatcacttagaagagttcagaagatccctttgtgatgttgcaaattcgttgaacaactgtgcgtattacacgcagttggacgacgctgtgagtgaggtccataaaaccgcacccccgggttcgtttgtatataaaagtttagttaaatatctgtccgataaggttctttttagaagtttgtttatagatggctcttgttaa

SEQ ID NO: 606 - DNA, 10923 bp, Celery latent virus
  source 1..10923: mol_type = other DNA
atgagcaagagaatatatacgattattgttgttttgtgctttcaggtttgctttcaaaatctccgaacacagcctacacaatcttcacataccttctcaacaaatccggcgatccccggtaccgacgctcttcaatttgaagaaaacgcaaacttaacttactctaccataaaatacaatattttaaagtttaatttaaattacaaacaatcaatcatgtctgtggtctctttcgggtcaatcacgagcatggacttcgatgctgcatgtctagcagctatgatcgaaacccctggtggctctattccaccaactccacaatcaccacccacttcaccagtggcggtgaaacaaaggaaaattttaaattttccaattgccaaaatcaggacaactcctgatgcatcttttgagatgtgtgtgaagttccccgagagcttcattgattccttctgtgctcaagcacagaaagaattaaaatattggcacgctgctattacgcagttgaaattctttggtggtgagacaccaaagactcttgaaaccttggtgaaccaaggtcaagctcacactcaccaagttattttaaacttggttaaaatccttgatagtgctccaaaagcaattcaaggaaagaaggagttggaaaatttcttccagctgagcccacatggaaacaattccaaagaaccaattgacgttagtcgaaaggtttatatggaaccgtgcaaaataagtccacgcaagcgacaagtgtgctcctgtgacaatgacgatgatgcacattatcattgttactattgtgatattgtgtgttcaagcaaaaatctattgcaagaacacgaaagggatttttgcgaggatgcacagtcagtgcaagcatttgggtataaacttgagagtccaaatgtctttgacccaccccatgtgacgcagcaaaggagtgttgcaccatctttgggaaaaactttggaatctcctgtgaaatctccagagcagtcaaagccaaacctggagaaaagtttcccactagtggaatcttccaccaacagtggcatgatcttctttggatcaatagctaccatggttccgtctcatattgaaaaatatgtgaggaattgtgaaactgagaatccgattgatgcagctgcatcaaatttggcgatgcaagaagctaaaagctctggcgctccttgtatagtagtgcatcataaggcactaccaggtggaaagaaagattttctttttcctcataactctcctcaagttgtgagaactgaaaccgaagagccaattgctggtaccattgatagaccaacaataaaacgtgctttatttacccgcattaagaagaaagcacaagaaatttgtgtgaacccagggggaaccatccagagaaaaacaaagcgatggttgcggccagcggaagttgcacaaattgtgcgagctacctctgatccacaacatccattgttcaaggtggacgttactcaaattattgaagttgttcatcctgtttataggactgaaagaactgaagttgtgcagcaatgcataacaaggggaacgtacaaattgatgtctaaagcccaacaacggaaggcacgagcaatgcgctcagctggaatgttagtgatcactgataacccaacaacgcattgggtatctgaacctcagaaaatgctagtggtaaaggaaaaactgagcacaacaaagcatgtgaaactccggaatgttgaagtgaatgctgaatctgaaatgttttggggaactaaaacaaaggagggaccctcgaaaacagccttaaagcgctgtaagcgtaacatcgatcgcttggctcttcttgatccgcaaatgggtgagtctgcgaatggtgaatgttggatgaacacctttaagcaccatttaaaagtggggagcattgatattcttccaaataaggttcgtttaccaaaccttaggtcggcattctcacgatggatacctttggttgattatgttgaaattttgaaatttcattgtaagtcacaaccaaagcttaaaagggttgtgatacctactccagttacttatctggaaggttctagatatcacattcatgttggttatagcaagaactgctcatggattacggtcgaacaactaattaggcaattgcagactctgttaacatcatccaaatatggagaacattttaagagagcaattgttggtggtgaaccggaagacaaattcacaccagtggttcctatagttgacgtggaaactgagagagctaaatctagcttggcaaaatggacaactgcgcaacagagatatatgggatctattagaacccgaatcaactcacaagcagaaaaacataaaatcgattcggaaaaaaagatctggataccaatgaggcacgacacgatggatatgttaactccaccatatcttttcgaaaatgggctgagaaacaacgaagttcaacaagtcggccaggttcttggagattctgtagatcgtgctggaaacagttcaggtcagagttctcaatgccaacaacaaaatgtggcgcttgcatccgaaggaaacaacgacaacgtgataaacgagagcgtgcgcagcattcaaaacttagttactgccaatatgcagttgcaagagcaatgcaaattgttgctcgcctcacacgaacaagctatcatggactccgtagaacacggaaacttggagattcagaagcacgatgtagaggtctcgcagaaaccatcaacgaggaaaagcgactcacagaggaatttgcaaaaattctcattgaagaaaatagtcgcctcagaagagatgtcgagaacattgggcagaggatggagaaaatctgtcacctcaatcggtgttccaattgtgagtgcttccattgcagaagctttaaatcaagtcgttcaaaggggaaatacttcctggcttgatgtaggcatttctggaacattgttgaagcaatgtactctttttgctacgagaacttttcaagcgtattgtagctacaaattagcacgaaacgtgctgacattaaccgtgggagaattgtatgataatgtgaaatcatacatcaactctataatgggttccacagatcctgaagtgactggtttcttgtcgcaagtacgtagcgcaccttcaatggtgaagatggccattttgctcacaatgtttgctatctcggtgaaattaatgagaaaattcttcaaggtgaagaataatggaactagctttactgtaagcggagagaatgtctctgcaagccagttgcgaatctcagcacaggctcaagctcgatcaactgacaacatgaccccaactgtaaagaagctttgtagcattcttggaatgattggtttggtttgttgttgttacgatagaacaacatgggcatatcaaaaggattggatggatgcttggatcacaagtatcacatatgccggtgcatctgatagtatttgggaatcaatttcccatccatttgaaacattgcataacattgcagtgagtggaggagatcgttcaccagaaactacagctcgtttggagcgaattttggctggtgcagggttgaacgcacaagcccaagcacttgatgaatttggagcgtctagctcagtgatgggtcagacactgcaaaacatattggatgaggttgaaagtacaaatgtgtcaatcgttagtgaaatgaaagcattgccacactaccaccgaaatgccactaccttcaatcaagcggctcgtgatttagtgactgaaccagatgcaacatatcaaatgttgttaacagcagcaactggtactggaaaatcaacgcttttcccagtgcacctaaggtcacaatctcaaaagagagtcttgctgctcattcctctcgttgcagcaacacatggagtttaccagcgacttaaaagtcaaagggtgaatgatattggttaccatgctgattcaatatctgaaaacccaaatgctaaattaatcatctcaacatatggacacatgtgtgtgaaattacttggtggtcaaaacccttttgatcaatttgattatattttagctgatgaatgtcatgttgtaacactcgagactgttacagtgatatcccatttactccaacagcgagaaatggcgacgtggaaaacagttttcatgacagcaacaccattcaacaatatcacacttaatagtgttgagacagaacagcctgtaatcatgcaacagaccgagcatttccacaaccccaaaagctttgtagattttctaaaagctggcggcactgaaagagtgcaaacatatgctaagggaggctgcatcgtattctgttctacccaaaaagaaactgaggaatcagcgaaagctcttaaagcgagtggggttattgcactcttttaccatgcctctaaccgattggaatgggattcctttgcaaagaaaaatgagcgaagcatgggacaattaaatttttatctctttgctacaaatgcactagaatctggtgtgacgatccctatgaaaagttgcgttgattttgtaactaaaatgcatccagtagttggtggagataggaagactattactatggctccaacttcaattagcattcaagagcaattgcagcgtcgaggtcgagttggacgaacttgtccaggtgggtatctatacacatcagttggaaccccgttgatgtataaacttgacccagattcatccattaagtacttgttgtactgttggaagagtggtatcaaatgttataaggaagcattaaatattcctgatgaatgcacgataacattcactaaagagaaaattggtgctatttggacacatgacacaccgccagttgttacagcagccttagtggataattttggtgcagtttacaggaatgcaaacttcttcttagcatcacatcgaagaaattatgtggaaattccacatacaactgatatgattctgccctcaactctctcgacatgggagaattttgaattggatgggaatgaagtatcagatggcacacgaatgagagtaccacaaaatcatttctttttccgaaacgaaagggtccaagagagttggttgaaattgcaagctgcaattcttactgaactaactgaagcagaagccactaagaagcgagatatagttatcgagaatctgatggcgcgtcgagtatcgggccatcctgcttcgaagcttgaaatagctagaatgataatggccaaacaacaagtggtacaacaagcaagagacacgaaacgtgttcgagaaacccttagtgagagtatatctgattactccggcatcttctcaaacttttctggaatattttcagttcaagaaagattgaaaaaggcttctatcaaggctaatgaggaattagatatggttattcaggaaaatgaatcccatattttatttctacaagacatgataaaagaaactcctgagatcatccctgatatggctttagaggagcagatccaacatatggaatatgcaaaagccatattggaaaatggttggatcagtgggaatcctcaagcaaagcttctcattatgcgcacaacgcataaaaattttcatgatcttgttacaaaaaccaaggatgggacctatcgcatgaaatcatatgtgcaacgcatgttcgattttgtgaagaaacatccattgttaatttttatgtccattatgatgggaacgtcattagcagcaggatacttcatgatgagtaaagactctgaagatgacgatgcaatagtgcaggacaaggttttcaaacgcaatgataaggcaatgctggaatggtgcttgagaggcaaagcatgtaaatgtgacgccacacacttcgaggcacagtatgtacttgattcacgtcattatagaactattctcgaagattgggtaaagttcccattgcgagggttccacaatatacaaatagtaaactatggcacagtgagcaaatatgcacgtgctctagctttcctatcagtttgtgcactcttagctaacccgactatggtgtataatagcgcagcacattccatggctggaaatagtgagtataatgagtcagtagcaaaatccctaatgcacaatattctaagagattggaatagagtcccgctcatagacttattggtaaaagggatagatggaagtgatgatcgttatgatcagtacatacatgaattatatacaagtggaggcctaattgcatttgaatcagacactggaaagtttgaaggaaaaatgtctattagtcaatatcgaaaggatgctgctaaaggacaaacaaaacgtagtgcagcttcacggtcacgtgaagaagatcattatgatccgagatcatcaggtcgactcaagagtgggatcagacgagcatatcgtcaattctataatattgaagattctgatgtgcaggaaattatcctcacaaacaagaaaggagctccaattcttaaaattgggagtcttgatgaattgaaccaacatgttgatcttctaaaattctcagatccagaattgtatgagttgtatttacatgctcgagataaattggatcttgacgaacctgaaagttcaagcggcttcactggaaagtggggtgactatgcggaagatgatgaattcatgaagatgatatcagctttagattcgttaacaaaacaagcttcggaggaagcatttataccagttcaagtgaaacttcgagatgggcgaactgtccaggcaaatgtcgcacgttattggcaaaaagattatccaactggaaaatctgtgaagcaatgggctcaaactacttgggctccaccacaattcacagctcttcgagaaagggtaggaaaagctcttgaactgattcctgaatcgcgaccaattcatcttcatggaaaagtcccaaatggaacacttatagagttccaagatgcaatgaaagatctgcacgagaagacagcagtcaaggctgtagctgaggctaaaatcggagatactcaatttgaggcggatccttctgatgtaacaagccgggttggtgtggttatggtgaaaacatcagcaaacgctgaatgggaatcatggaaccaatgtgttgctttgaataacatagtgatttttccccatcattacacgcttaaagatggtaataatttgagattcaagttttcatcaagtgatttcgaaagcacctgtcacattgtggatgggtacaatgggcttgacatggcttgggctccaattaacgttaaaattcgtggtttgaagaagaaagtttgtttaggcacgccgcggaatggatcttacctatggcatttttccatgattaatcaagggaaagatttgccagaggctcgtcttatgggatactcctctgtaacgaaagtacaagaagagtcgcacccatccttcgattggacacatacagtctcaacgcaagttgggaactgtggtggaccctttgttgataaacatggtgtcattgttggatatcacactggagcttttcaattgggacaatttaatactttcctgggattatcagcaccactaattgcacatctgacaaaattggatgtcaaaccaagtgcccagccccaatcaaagatgatttggagggaagtggatttttatcgatcaccaaattacttacccccaaccattaataaccaagagccaattccagaggagtggagatatccagaaggtaaatctgtttacccatgtgttgatccaggatggatgggttctcgtttggtgaagggatcaggttttcgtctcattggaaaaatgcaacgtcatgtggaatattcaacgaagatttcccttaatgagcattttgacatgtggatgtctcaagagaaaactcaaaatgagttaactaggctgaacaaaaatcgtgtagagaaagggttagagaaagctttcatcagtcacacgatagcagctcagaacaaggaagctgcaattaaagatacgagcaagtatgctagaacaacgttgggaacatattcagaacctttgttgaaaagagcgactgctctgacaatccaaatgctcgaggagcatattaagctatgtaaacgccaaccactggatttagtctatggggatatggaatggaacacagcatgtggagcccagtacaatggattgaaatcagcatttagggatcaagttgttggcatcgagaatatggatgcttatggtcaatactgctgggagcgtttcaacgttccaaccgatcaatacaaaccatgcatttggacaaattcattgaaggatgagttacgaccaattgaaaaagtgaaggagaataaaacgcgcactttcactgcagctccaatcgagtttgtaattggtgctaaacaagctgttgatgcattcaatcatcaattcatggatgcacatttgaagctaccacataccgttggtattaaccaatggtcagggggttggcacaaactatacaagaagttgtatggtaaaaactttgtgtactcaagtggagatggaagccggtttgactcaagtccgtgtttctatatgttcgatgccttgtacacaatacgtacatattttgcagatcctgaaatacaccaggttctggagaatatctacttggaggtttgtcacactccaatagtgttacacgatgggaatgttgtgatgaagaatcatggaaacaatagtggacaatgttctactgttgttgacaatagtctcattatgatgattctatgttgcgcctcttatctagagcacactccagctaccatgcattccctcgatgcaataaaaagccattggcatttttgtgtgaatggagatgattatattggaggaatgtcaccattgttagcaagccatttgactaaagagaagatggcaaaaaccttcagtgacttccagttcatatatgagtggtctgattattcaccatcattatttgaacaagattatatgagtttaaaattcataaacattgttgaacgaaaaggacaaacaactggacaacagttaattgctccatggcgtgaagcatcacgacaactctccactttggctcacacatcaagtggtgcacctgaaatcaaattacaagttgctctaaccgagagggtgaaagcatgggttgataaagatttatttgatttcataacagaatactgcagatggctcgtggagtatttcgatagatttacgaacacgcaagcatggaatgaagctaagaagttatggtgggatgaacaacaaattttcaaccattatttcagttttgaaagcatttgcaatgcgccatactcacaaattgtaaacgaaactcctgatgagttctttgctaatggtgtgagagagtcccgaccattgcgaatcctacgcgatggcatcaaatttggtgttgctgttacagcagctaattatctgggaccaagcgatcacgatgtacccatgattgcaaacacaatgcttaatgttgccaagataggtctcgcaaattcaacagccgagcggattgaccgtatgctatttgggaaggaaaaccctgaacatagtagagcggattcgctagttgttgtaaaaacagagcaaacagatgcgacgatctgtttgcgaactcactgcaaatgccaagcacagcacttcgatgggaaatatgagtgttgggtgagttccccatctgttgctataaaaatgtttgcaacattaaagccccggattctttccacaacgaaatttgttggagttaagtttctaccaaaaatactaagagctcatgtatgggccttatacctatctggattctcttgggaagaaacaatgcaaattgtgcaaagtcactaccctggcgagaaacagcaaagaaaagcggattggttcctacagcaactgctgaaagagctagtattgatattcaaagtgaaagggtcgaagtttattgagttgggagagcatgctcaagttcaagggaaaactcaactcgactctacacaagttgatatggatccaaattttaatgctgcagcttatgctgcaactcttcgaggaggaccgcactggggtacacataattcccaaggtctgtttgatgctattaaggtattaaaccccaatgcagcaaatgttgacattgggaatgcgcgaactgcggttcagcgcgagatgcagcggttgatagctgccgatgctccgcgacaacaaccaccaccacaagttggtggaggacaccaacaaccacctccagctggaggtcaaacgcaaggccagcctggtggttacacaccgagccaggcatttaccaataaatttggtaatataatggctgagcccgatgcccccctcgtgctcgactctcaagcaacaatgagggaagttgcccaaattgaggcagcttgggctcgtcttctagaggtgcaatctctagagggtcttggttccttctggaactacatgttttcctatgtgggaaacaatggcacctcatctggaggtgatcccagggattacatccctgcaggaaatgggcgagttacacttgcccaactaaagtccaaagctcaaggtgagcaatggcgacgttattggcgtagtcatgcgtcagacatgagggatttcttgaggcttcttcaagcttcagatagacctttgcctattcgttgggcaagaaacaatggcattaaagatgccaattacgagattgcattcgattttgcggatgcactcccagatctctcagctgcacaaatgtcaattattttagcagctaagaaccttgccgtaaggcgaggtcaaggccagatgcttaatgctggcaccaaggttggaggtcggtcaagaaccgaaacctatgaccaggctgtccgcgatgctgcggatgtccaattcccaggagcataa

SEQ ID NO: 607 - DNA, 6096 bp, Black grass varicosavirus-like virus
  source 1..6096: mol_type = other DNA
atggatactctggagcacgctgaagccaatgagctagaagacgatgattactttcttcctgacgaaggacctcttcatgatatgcacttggctagtgcaatcaacttggatcagatacaggagttgatgtatccagggactataaagtacaagatagatattccctattatttaagggatgagtacatgctgatagaaagtttgtgcaaaggagacaagatcaaaatggagcttggaatgttggctccatctttgaaactgtccaagcctggaggagaattgtcaaccatggatttacctgcatataaagaaataggaaaccttgtctgtcaggctttgaggaatagggacatcatgattcctatctccatgaatgatgtggcgctgaagctcccaggagtaatagtctacaggtcatggggtatagcatttgcagaattgttgaagattatatgcacaagagcagaagtgatgaggggagggtctcagcctgtatatcaaggcactggaattgaagcaggtgcagcacattgtcagtttcaagtcaacggcaattggtaccagatcgttgcgaggaagaatctctcaacactatatgacaggcaagagaatgtaatgtatataggaaatatacactcattgcttttgctaatggataccatcggacagaggatttgtttaatggttgccaatcagatagcagaactttatgatacacctggatgggttgatcaaggaaaaattgaccaaatattatcaactggagatgacattctggaagaaatgggaaatgatggatatgaaacaattgctatgtttgaatctcttgttataggaaaggtgttgagagcaactcccgatgacatcacagaatgccataagtttttgtacaactgtatggatgaggtagaaaacatgctactaaactctgctatgagaggaagaatcattgaacttgttcacagatggttggccatatttgacagtttatcgatcaaagagttatcaaatgtcttttgcttatatcgatgttggggacacccggttgtaaatatctatgaagggatggagaaagtttacgacatcggcactgaagagaaagaagttagcccatgggtagcaactgacatattgtgtcagttcagaaaaactttcttgataaattattacgagaagcatcactactatccaaacgtcttgatatcagaagaggtagaaaactcatatgttgctcaatgcattaagaagggttcttcaatagaggagatgtatcctacttatgatactaaggacttcttgggaatcgaaatccagaagatatgggacattccaataacatttgacctttgtcacattcttaatgataaagcagtatctccgaaccagaaggagctaacagacagtgttgtcaggtaccaaaacactacaggaggtcagaacagaagagggctccttagatggttgagaggaaagagcttaaactgcagagagttccttcgggagatagatcagaacgggctccctgaggatgagtgtatcattggaatgtacgagaaagagagagaaatcaagatcaaagccagaatgttttctctgatgtcagaaaggatgagatattacttcgttttgacggaagaccttatagctaagcacgtgctggagctatttcccgcaataacaatgaaagattcacaaaatgtactccaaaagaaattttggaccgttggcggaatgggaaaagactccacattcgacgttaatatcaacatcgatttttcgaagtggaattcgaacatgaggaatgaattaactcaacccatgttccaacagttggataagatcttcggatataccaatttgatatcaaggacccacgagatatttgaatcatcgtttgtatattcatcttcaggcaagtatgttcccactgtaaagtttggaaaactccaagaggatcctcctatggcatatcgtggacataagggaggctttgaagggttgagacaaaaaggatggactgtagctacagtatgtgccttatctgcaattgctgagagaagaaatgtgagaacaaaactgatgggacaaggagacaaccagatagttagaatactgatgcccacccagagatggaaatcaaatgagcttactatcaaagaaatgatccaaaatgccaaacagatccaaaaagcctttgtaaccgatatggagagaacatttgaagaggctaaattgcctatcaaggtgagagagacttgggcttctacgagactatttatgtatggaaagatgatcctacatgacggagatgcgatgccccaatggttcaaaaaagtgctgaggtcatacgctctaaccaatgagggtcaagtcactgtagcaggggtggtaggaactattgctactaacatggcttcagcggcaggattgagtgaaatgcctgatgtcatgtatctcatatttgtagcaatgactgagtggtcgctcggttacttgttagagtaccacccattcacacggaaatgcatcctaagagaacatgagtaccatgtaaagatccccggagcacatagaggaagagattatagggtgaggtcagttaacaagagaagattggtagtttctatgatcctgataccaacggcagctggaggaagtgtaacagttcctctccctggattcattatgaggggattccctgatcacgcctcagaggcttatgcctggatcaagatgcttgcggaagtaaagagtccatacaaaacaatgttaaagaactggtacactttcatcgggaatgattctatccaacctgatatgttgatccagagcccgtcatcaatcaacttcttgaagccgccaacacccagctttcaagggagaatgaacgtaagagagctcttattgtctggagaatttgatcagaaccagttcatcaaagaagcaggaacaatattgggagtctttgacaggaagaaggtctgctctgcgatgttaacagacccaatgaaccctttcataacctcagaggtttattccacttatgcccatgtgtacatagacggagtgataaaaagagtagaaaacaccagtactatcaagaagttggcccaaaaggtgaaaaccaagactcaagtcattaaggcaatgatgtacaatgaacataacttcatcatgttcataagttggagagcaatgaaaagaggtaccatcgactatgattgtgcaacccagcaagctagaatggctaggaatattggttggggaagaacaattactggtgtgaccacacctcatccagtagaattggggattggtcatatatgtaaaggtagacaagatgaatgtcctccaacggattacatttatgtcagaataaatgaaaagggagaatttgtcccttatcttgggtcaagaatcaagtgtaaagtcgtatcagagcaagatatagatgccagaagagagccactgattgctgtgggttcgcgtatatgcaggtactcgtcgtggcttggaattggcccaaatctgatggaaattgttgagaaaaacctagctgttgtctgtgacacatctgtctatgacaaatttatagacgatgatccaaagggactgttgtcatcaggatctattgatcatagattcactccagcaggagcatctgagggagttttcatcaactatgcaccacagattggttgtaatgtgtacatgtcgagcgattgtatgccgacctatggaagaggccagaccaactacactttgcacttccaggctctatattgttggctgcaatacatctcatcaaggagggctgaaagtgtattcatgcatcatcacatagagtgtgaagattgtgtcgtaccaactactgatgaagtccccgacatccagtgcccctttccctatttcgataatatatatcccccaagagtaagggacagcatatcaagagccttgggattcattgataggaaaggaggactagatattatgagcaatgtaagatcattgtgtcatgaagctgaaccaggcatgtttgatgttagacaattgcaaaagggagtgatgtggacactagcaataaagatcggatttcgattgtaccatgggggattattcgggtcagatgataccagagttgaggaccttcaggagtatcccaggatttactcatataaattatacagagataccttactggtcaatgtggcacatgtgatgatgatgcttgcagccatagagatggataaggcacctgatggtgaggaactcgcaaaagtcagaagaagagcaactgataaactgttgtcgaaacccattggaagcttcaaggggttaggaggattaactctaggaaggactgatgagaatccagataacagtcatttgtttatgactggctcattcccagaaactgtattctcaatattgaatacttccaagactgcattaatagagacaattggtcagattggacgcttatccatcgaaggaatgggccatcttcctgtggccaaaggttctctgtccaataagcagtttcgatttctgataatgatgagatgtttgttagaatgcaggaactctcattactttcaacactttcagaagatcccagaggacgaaccaggacatccagcggaccctcaaaatgacgtttatagaatgcttgtcaaaactcccgttctagatatgagtctagacaagatggtcaaatcacttgctgttattaacgaaagaaagactcttccgataatcgaatggaataacatctccttcgaatcaacagaagtgatctgcaggacaggaactcccaggtccatattcatcggaaatagaatgatcgttgagcaaaatagtagaagagagtacagagaagtaactcttccaacatctagcatttacaagtgggctgggatcttgtttcacaaacccttgaaaagacatatcattgtgttgggagatggaacaggaggaacctcactgttggtgaaaacattcaatcaagactctacagtgtacccttgctcctatttagaaacccataagattattccccaagatatggaatgtttaatgcctcaattgtctagaggatatgagggaatctccgggcgagttttgttaaatgttccagatgatatcaaggatcctctctggtcagaaagaatgtctagtgagataaatgacatgggcgttgaaaggacctctatagtctgcgatatagagaccgttgggctatgtgttctccttgatgcattcaggagtttacctcaaggagttcaagtagttatgaaaacctatgccaaagatatattgactaatatcatgtcaataatgggcttgaatcaggtagaggtgggattttctccgcatctgaaccagagcaaccatgaagtgtttctaatgggacacatctcacagaattcttttccagatcctgacatgatgatcaatcaaatggtaaagctttatggtaaggtgagagctgatccaagatccagaatcctggaggaaatgaggatgataaacaaagtattcaagccattaaagaatacgtctgtgtctctatctctagctcatataaataatctgggaattactatgaccagggagatattacaactggatggacttgagatctggggatatgcactgcaatttgtaaatcgtcattatgttgacccatctcatagagcatttcttgctgacaagaaaacgatgaacaggaaaagaaagagagatttgacaagggcattcaggatattgctaggagtggttgtgaatccaggatacctggatataaaacgcaaatggggtattagaactcccaaggaattcaaaccaagaggaatgaaccttatactagccagagattgtgatgatatgggtgtcaaattaaccaagaaggacaaattggcctctgaatgccttcattgcttttggaccaggaagatgaggaaagctcctctagatgcaccagatccaccgggggaagattggatggaaagtgcaacaagagttcgatcatttgccagcagtttatctgagcactcttctcatgattacatcaatgtcattgagacagagtag

SEQ ID NO: 608 - DNA, 7017 bp, Maize suscal virus
  source 1..7017: mol_type = other DNA
atggagacctttctagatgaacaatttgatgatatgctatctgaatttgagcaagcacggctgtctcggtttccagcctcacatcacagctcggctttaacatattatcctcaacgccatattctgtcattaatgtctccaaactgtcctgtgaaaccaactccccttctgcgggcatactgtgatgcggtcaataaagtatctgatctcttggggggtgggtgtgatgccacagacaacccagctccagtatactcttatatcttctctcagacaacggcttcttcgccagcctattatgacccagactatgaggatccatacctgctggattccctgcgagcagcctcagatgctgtgcttgaagatattgaagctatagaatctcatcatccgggtttttcgctggataaccagaagttgcgactgctgcggaaagtctcttcacgtctccatgcttcctgcaaacagatatttgcggtgcgaagaatgttagaaaaagttagaaatcaaatccagaaatgtcacatcggggttgatcacaagcttatgccagcagtgagattaggaaatttgagtatacacactgttagagatctcatcttcgtagccggactgcaaccattccccatgcgcatccatatactaaattacgatcagtggctaatgatctacgacacagtctgttgccgtgcaatggtaaaggtggcaactttatggaacgaggaattacgcactgacaatatcccttcatgggagatcgtgtcctcagtttataaatggggcgacgcacttttaaccaactatggtgtctcagcgtatgctattataggagaatttgaatcaatagtgactggtgtcttaattacgttttctgacactgacacactaggacttggtgcctcatttgtcaactcaataatggagaacgcgcaagagcaaagcagagcttataatatacctgcgaatgagacattgaagctgatatcattgcttagaactgttgagtctgtgaactggctgtcagagttgttcggtttgagaaagcattggggaaatccaatggtggacgcgcgagcatcgggaaaagcagttcaggagaaggtagatgaggtattgccagttaaagggactgcacttgtgaaattattggcatctttcaacaggatggttacactgtcattcatctctcagcatgggcaatggccggacggttactacctctcgaactcaagagactgcccgctgaaaagagccttcgaatcacggtctacccgtatcccagagactgtggaagggcatcgtcatgaagactgggcatgctttgtgtttctacccaactgcattttagactcatatgaagatgacctggcattaatatcagataaagctgtcagtgtgtaccgcgaacacttagattcagtctatgtgcgggctctctgtaataagcagagtcagggcacggttgaggaagacagaaggttgatgttagagtacttgaggaaacagcatatgccaatactggatattttcaaaatagtaatgacagacgcagtgccgccccgatggatggccaactgtgctagcatgaaaggaacagaaatgaagcacttgaaggcccgaatttttgcggtgcttacatatgagatgagacagtactttgctgcgtcagaagacatactgaagaacaacttatttaagtataacccgcatcagactatgactatgtcagaaacagagctattgactcgactaaaatcattaactactcaattggatccaaacagtcaaagccggcagctgagtgtaatccatattgttgatttttcgaaatggaatttgagaatgagatacactaatacatgcttggtattcaaatctatagacgatttcttaggaactccaggcttgtttgagaattctcatccactcttcagtgatatgctcaacatggtttcagacccattcaatcctccagcgttaggagtagaagagacagaatctgacactatttggagaaatcatcacgcggggtgggagggtcagcgtcagaagggatggacaatcttaacatctgcactcttgtctgacctggagagaacaaccggagttcatagtgaaatatgcggccaaggtgataaccaggcactactaagcaaatttcctgtccccactatctataggaatccggaagaatggatcaagagtgatcctacggaggttaggaaggtgcttgacgacttctatttgagattagaaaaggaatgtgaagctgtaggtctgaagataaaaacagctgagacctgtcgaagtctttgttttttcaactacgggaaaagactctatttcaaaggcagtgaactatccatgaccctaaaacggttctcaaaaaacataacccagcctaatgactcatacccaacaacagaggctattcttaagacatatgagggttcatcttatgcagctggcctttatagccatccaagtctgctgccatactggatgagtaaattctctgtagcccatcaattattcaacagcttcactaacaaccagctttgtgcagaagccccagtacagatgatgtccacctttgggttcccgatcaactaccgactgatcagcacgttgatgaagatcccagcatctctaggtggcccacctcagcagtgtctggctgattatctgctacgcggccatccagatccactatgcactgatttagtcgggttgacattgaagtcaaaggccgggtgtgtgatctctaagaagataattcgtctagctcaatctggtaaatggtttagccaacgcactctgaccagagattccctaatcaaatctccttattctctgaacctcagggtcccattatcagttcgacaaccaattgaagaggctgtgctcccggctgtgcgagctcactgcaacaataacttagtgaaatctctatttgatagctcgatggatgacgacgagagatatattcttgactctttaggtcttatgaagccgttccatccgctcgtggccaacgatatttattcaaggactttaccaggaagaagacagatgtttatatcaggactggcgaataccacgagcttaggtcgcctgattaaagggaattctgcgtttcctctgatctacaaagtcatggatttggagatggagcagctaaaaagctggatagtccagctaacagagcttctcggtttacctgataatgatgatattattcttcctcatcatatattagcgcaacagctgcgcgagaaatcgtggaatacagtcattgagggcataacagttccacatccgttagaacagttcatgcttactctatcaaaatcggacgtctgcaccaacgactgttatacagtagaacctgagcatattgtattggttcaacactccgaggatgtggttgtgtctcccggtgtggaccgtgaccacatcacagcagcgcggtcaaagaaagggagcccctatcttggcagccatatcggagaaggcattgtacagaagcagcttatttgtctaaatccagatacttcctggagagatgtcattagactaaacactatcaagcgttgggtggctccagaggggtctaggctgaggttgtttatgaatggaattataagctcgcggactaacatatctcgtgcctacatagatctcgccacaggcgttccgagtagattgtcttacaaccaccgggccagcctgatggggtcaataaacagctgctctatcagttcgaccacaaacatgcacacaaggttgtacttatcctcgaacagaatgggagattattctcatggtttgaaaaattatcacatgcctttcgggcccacctttctctgttatcagacgctcgtctgcttgatcgggatcttttcacctgagaaatgggcattccctagaaatgtttatcatattcatgtcagagactctagggtgccgccggtgtacgatggcgggttagagctagaagacctaactgtccttgatctgaaaggacacccgcctaccatccttaggtgcttagcctccaaactggtattcgaagcagcaccaggatatgcatcgttcggattttggtgtgagttcgaaacagcatcgaggactgatgcgaaatatgggtatgcccaacagctgacgggtggtttgttcattcaggagacggttgtaagagaatctataacacacgacaggattgggagctttgcatcgagaccggctgtcatatcaattggagacatctcattgatcgagccatctctattccttcgttccatcgcctggggtatgctgttgctcgcacctatgcatctgctgcatttcagaggcaaatatgcattcaaagtttcctgcgtggaatatgtcaatcttttcagccgagctttttggtcttcatttgaatccccaatgagcaacccccgaataattaggaagctcggaaagcatgtcgcgttgatgtctagtcatagtctaggtaggctagattccggcatcatcccagctctgcagataataatcgttgaagagatgtggtgtatcatacattcgatcgccacctatttccgtcgaggaggtgataaaccgaatatcccccccatctttgccccatcgggttctgctgccctactcctcacctcacgagtgatagaaatgatggtcactatacggctagtagttgggaactgcagcatcagtaagatagtagggttcccaagagatttctcggcaaatcttatgagtgtgccgcagccaatatctgccgcagctctgatcgtgatacaacatgacttcttagaattgcagcgtcacttgaaactgccattacgggacatggtgatacccagagtgttctcaacccattacccctgggttgatatcttaaggaagactgacagtgtggaggcagacgatgaagacccgcagaggcaattagtcctcccagtcgactttccgcagtgtgctaatgtagtagaatttcgtatccctgagaaccctgtgttggagactactccacaatgtgactgtaaaacgacacaaagaaagagagatttacatgatgaatgtttcttttcgctgagtgggaactatagcaaatcccacctcaaaattctggagttgatcttttcgttccacctgcctatagcaaatctctgcgtgcttggctctggcactggttctgaagcatgtgcgttaagtaattatctggactgcagacaggtttatgtgaattgctaccacaaactaactgacttctccccgcatgctgcttccacttatgttccgcctgcattcaggtctgatggtatagtgactaagctcgtctctccagcctctgctgtcctaagtctgtcagatctcacggacatcaggactgcggatgctatatatcagcacttaagaggtattgctacaactggtatcatttgcgatgcagagattccaagtgcagcaactcctttactctactcacagataatgcatacaatagtggcagttgtgaggaagaaagcctctatcaactgggtgttaatcaaagtgccgatcttctgtgttcataagcttcttggcctggcagctccactagctcaggccttccatagaatcatctttgcttatccagacttcgggaagcctcattcaagtttggtctatattgtcgctactattcgggctaaggcaactccaattgaagagaataggctgcctactgtaatgcttgaagacgagatgctcagagagatgttggcctctatcagcagtcagaaccattgtagattatatgagatgagggtagcggatagaataagtcggttaagccttaatctaacccttcctcaaagcttgactgtggcttcgaatcggtttgtgcaaggcctgatcctcactgaagacgaaatctccgacccggaacaagttataaaggtactgaaggctgtgaggcaagggttgttgacctcagcacagaaagtagttgaaactcatttccgagttcataatgaaatcacaatgccgaggtcagctgtcctctctgcggatttaggaacccttcacggacagttaaacaacacatacctgaaagtcgctaaatgtgatctgctgttagagctgttgcaccttattcatcctaccctcgaacagatcaagaatcgtgtgtacagctggttggctacagcccactcgtatagaatgagaaacaggaacttcaatgtctacatcaaccagaccagatttatatcacatgattctagatatttattcgaaatccttggacatcttatgaaaagatctgttcccacagttggactccccatccatatggattaccatttattcggatctaggacactgaggcctaagcaacttattgttccttgcccaataggcgtatgtcgaagtccatcaggtagaactagcaaatggaagtggcagaaacgaagtgagatacttggttgggcaatctcattaaccctcacaaatttaccgatagcagttgaggatcataatagcttttcgctggatttcctacacgaaaaaggcatcttagaagatgttcgcatgatggcctcattaaacccatcccgcatagaggtcccttacttctttaggcccaatgagatggccctcgatttgttggcgcatgaccggttgttccttgttgcgccgttgaattctttctcactactcagaagccgttacacaaccgttgagccatactttgttccttggtcgggggcccctttagcttggtgtctattttatctggaggagcggaaccaaattgatagcctgattgtggatgagatctgccttgatgatactctgtcggtcaacacttatgtcgacacagacagcatgtcctgtagatgcctgagctgcaaaacggaagaagtcttgggagagaggttttcgttaaataccaacgatctggatttcctgtgttctcttggatctatagagacagtctatgattctgagcatgctttgtag

SEQ ID NO: 609 - DNA, 7954 bp, Horseradish latent virus
  source 1..7954: mol_type = genomic DNA
tggtatcagagccatgagtattgaaaaatacataagatcttcggatcaatataacccaataacaaggttatacgaggtatatacgcatataccccggatcggcagcgtagagatacgttttgctaagtcatctacatacggtgtagaggacacatccgctaggatgagcatgtatactgccatcagatccgtttgatggtgcgcgtactaagtataactaagttatataattgttgaaaaacaaaatggatttatatccaaccaaagaggaagatacccctcaaaatcaaactgagaaatacgttttctcaaaagaagattcatctggatattcggctgaattaatggtcaataatgacttattaaaaactatttctaaaactaaattaactttagaaaaagaaaaagtttttagaatgacaaatcctttaacctcaatggttaaaagcctgtgtcagagaaagaaccacatattctattgcgtaactacgaaagagttatcaatagatatttgtgaatcttcaggtaaagtctacttacctcttctaacaaatgaagagataaatgggcgattaaccaaagtcgatccaaggatcagacaaacactctctattgttcatataggtgcagtgaagatattgctcaaagcgcaattcagaaacgggatcaactctcccgtcaaactcgctctcattgatgaccgaatcaatgaccgaaaagactgcctcctcggagcagcaagaggtaacttaaactacggtaaatttatgtttaccgtttatccaaaatttggtgtaagtttaagaactaaaaggttaaatcaaaccttaagctttattcatgaatttgagagaaataatttaatgaataaaggagataaagttatgaccataacctacttagtagcttatgcactaacaaatagtcatcacagcatagactataaatctagttctaatattgaattagaagatgttttccaagaaattggaaacgttgaacaatccgaattttgcattattgaaaatgaagattgtaattgggcaattgatattgcacaaaacaaagctgaattgggtaaaactaaaaagcttatatctgataatcaattaaaaattgaatcaggagaatctagtaatggtgaattacatagattaaatgaaagcgttaataaattacgcgaaaaatttgtagaaatttgtgggtagaatgagtgatctcaccaaacttccacacatctacaagaaaggtgaaacgatagttcgtttaaagccactggcaataaacaagaacgatcgggtatatgtgtttagctccgctaaatccaatatacaatcaatcaccaactccttgaataatctcaatgagattgttgggagaatactccttgggacttggaaaatcaattcattttttggattatccaaagatccctcagagtcaacctcaaaaaacccatctgtttttgataatgctaaaaccatttttaagagtgggggggttgataatacagcgttactaaaagaaatcaaaacccttttagaatcgcaaaacactaggattaaaaacctagaaaaccaatcgaaatccttgacggataagattgaacctgaacctttaaccaaggatgaggtaaaagacttaaaagagtcaattaggtttatccgagataagttgaaagacataatcggataaaactggcgaatctaaatcagattcaaaaggaagtatcccaagccttagaagagattaggtctctaaaaaaggatacagaagccattctagcaaaattaggatcaaccgaacctaacaacctagaagccattgccgcaaagataatcaatgacgttacgaaagtaatacgagattgtccttgtaacaaggaaattctggaagcttttgctaagcaaccagagaagaaaggtgaaataatcccttccaataaacctggatcttcttcatccaagttaaagaagtattcgtaccccaatactggagtaggaaactcaaacctaggtagttctgaaaaccctaaagcccttacctggccttttggatcatagaatgcctagaaccgtgggtcaaaccatagatgacttctggtcaaatctaggtgtaaaccagctagatgaacatgagttcgatcttatgatcaacctcatgaccgacgatgatgtatcctcggatacatcctttgatagtttaacctctctcttttctgagttattacaggttgaacaggaaatcacttcggaagaagaaagatgccaacttcttgaaaaagaagacagttctgacgaatccatacccaacgattctgatgaagaaagcgttcctgaacaagtcaggatggaaaaaggcaaaggaccggccaaaccatacgactacttcgacaacgaaagcagcgatatggaatatggagattacaatccatacggcagaagcgggcaaacaaacaaacccgcaagaacacgaccaaaattggccagtgaaacacttggacgaaatccaaggattctcaatctcgactgcaccaacagtctgagagacagaaaaagattagtagaagaatggggagccgaaatcagcctcaccatccaaactaatctagacgaatattccgaccctgacatggtgttactattaatggagcatctgacggccggaagtgtcaaatcgttcatcaagacaacgaaatggagtgaactatccggaggaatctatgaccttgtcatggaaggaattcacgtcatgtttcttggcgaacaaccaaatgaagctttcgacaaagctaaagaacaagcagcagcaaaggacaaactccttaagatgcagctctgtgatatatgttctctcgacacattcacctgtgccttcgagaaagcattatacaaactcgattccggagactttcctccaattatcgagcaatatctggcgaaaataccggaggtaggcgccaaagcccagcagcgatacaaagaagaagctactggagcaatgaaatacagtcttggatttgccaacaagattgttaaggaagaattgaagaaggtgtgcgagctcaccagacttcaaaagaaactgaagaaattcagaaaaacctgttgcaaacaggttgaagaaagattggaatatgggtgcaggcccatatacaaaaagaaatccaagcggaggaagcccaaagtccgcaaatacaaaaagtacaaaccctttaaacgacgaaagaagtttaaaacaggaaagtactttcggcccaaaaccgaaaagaaagtttgcccaaaaggcaaaggaaagaattgcaaatgttggatttgcaatgtcgaaggccattacgccaacgaatgtcctaatcgacaaacttctcagaaggctcacatccttcaagaagccattcaacttggtctccagccagtagaagacgtctacgaaggagaacaagaagtattcgttatcgaatacatagaagtttcagaagatgaaacctcaacctctgaagacgatggaacatctacttcagaagactcagattcagactgagcaggtgatgaacatcaccaacccaaactcgatttacatccgaggaaggctatacttctcaggatacaagatcgtggagctcgactgtttcgtagatacaggagcaagtctgtgtattgcaagcaaacacgtaataccagaagaaagatgggaagcagctcccagaaagatcaacgtgaagatcgccaatgaaagcacgatcacgctcgataagatatgtcgtaacctcgacatcatcattgccggagaacgattccacattgacgtcgtcttccagcaagaaagcggtatcgacttcatcatcggtaataacttctgtcaggagtactctcctttcatacagttcacaggacacattgtgttcacgatgaaagatcaataccaagtaccaatcacgaagctccgacgagctttcaagagaggaattcctggatttttagaatccatgaagaagagatcaacggctcaacaacctgaaccgctcaacatctctacaaataaaaccgtttcactttcaagggggaggaggtttggagaaaaactcagaatcacccaagaaaggatggtaaaaatcgaagaactacttgaaaaagtttgttctgagaacccattggacccagagaagtccaaaggatggatgcaagccagcatcaaactatcggatcccacgaaggttatcaaggttaaacccatgaaatatagcccaatggaccgagaagaatttgagaagcaaattcaagaattactggacctcaaggtaatcaggcccagtaaaagcccacatatggcaccagcgttcttagtcaacaacgaagctgagaaacgcagaggaaagaagcgtatggtggtcaactacaaagcaatgaatgatgcgactgtaggcgacgcatacaatcttcccaacaaggatgaactccttacgctcatcagaggaaagaaaatcttctcttcctttgactgcaaatcaggattctggcaagttaggcttgacgaagaatcaaaatccttaacggcgtttacatgcccacaaggacactatgagtggaacgtggtccccttcggcatgaagcaggcaccatcgatattccaaagacacatggatgaagcattcaaagtgtttaggaagttctgctgcatatacgttgacgacatcctcgtcttcagcgacaacgagcagaatcatcaacttcatgttgcgatgattctccagaaatgctatcaacatggcatcatactttccaagaagaaagcacagctcttcaaagaaagaatcaacttccttggcctggagatagatcaaggaacgcatagacctcaatcgcatatcttggaacacatccaaaagttcccagatatcattgaaagcaagctacagcttcaacgattcctcggagtactaacatacgcctccgactacatcccgaagctagctcaaatccgaaagcctctgcaagccaagctcaaggaaaacgttcaatggagatggactcctgaggacacattatacatgaagaaggttaaaaagaatctcaacggattccctcctcttcatcatccccttccagaagagaagctgattatcgagaccgatgcatcagacaactactggggaggtattctcaaagctattcatatagatttatctactaacgaatctattgaattagtttgcagatatgcatcaggcagcttcaaacctgctgagcaaaattaccatagcaacgataaagaaacgcttgcggtaataagaactattcaaaagttcagtatttatctgacaccggtaagatttctggtaagaacagataatacgcactttaagtatttccttaatattaattataaaggagattctaaaatgggtagaaatatccgatggcaaggttggttgcaaaactatgtctttgatgttgaccacattaaaggcactaacaattgcctcgcagattttttatcaagggaattcaatggagcttagcgcgtcttttgaaatccgtcaacagaaacgcgacacgcgtaaaagatgacaccatacacttgtggtgagaatcaataggccactgcctatataaacactctatcaccgatctgaaaaactcagatcctcaaaatggaggaaatagataaactcttacttcaagagaaaatcttattactagagctcgatctagtaagggcaaagataagcctagctagagccacaggctcgatgcaacaaaaggaagaaattccttgccgtgaaacaccggtaaatactctcacgagtaaattggttattatggagccagggcaatcgtccaaatctataactattccagagcaaacggctcatggtaaagaatcaacaaatccgttgatggctagtcttttgccaaaagagacaaaggtggtacagaccactagactggttaaaccagaggactttttacgtccaaacatgggtattccaatcccagaaaaagctgagcctagcagttcagttggtcctaacaggccagaaaaggagattcaaactcctcataacaactactatgttgtatataacggtccatatgccggtatatatgacaattggggttgtgccaagtctgcgacaaacggagttcccggagttgcacacaaaaagtttgccactattactgaggcaagaaagtctgcagacgagttcaccactgctgcaggaaaagataggcttaacttcgtccccaaaggcgaattagtcaagccaaagacttttgcaaaggccgtaacaagccctaaaaagtcaactcaatggatcactctcggaactaaaaagcctaagaaggatccagaaccaaaggagatcgcctttcaaccggagatcactattgaagacttccagtatctctatgatcttggaagaaaatacgatggcgaaggagacaccaccttcttcaccaccgacaagaagaacatatccatgttcaacttcctgaagaatgcagatccacagatgatctcggaatgctttcaagcaggactaatcaagacgatctaccccagtgcaaatctgcaggagatcaaatatcttcccaagaagataaaagatgcagtcaaaaaatacagaacaaactgcatcaagaacactgagaaagacatctttctcaagatcaagagcaccatcccagtctggagtgctacagggcttttacacaagcctaaatacatgatcgagatcggtgtctcgggaaaagttcgacctgaagaatctaagtccatggagtcaacgattcagaaggaagaattaatggaccttgcggtcttaaaggcgcaaacattcattgacagcctaatgaagatcaatcaacgcgaaaagatcttcgtcaacatggtagactatgaaacactagtctactcaaagaacttgaagaagacgactcaggaagacaggagcgtcatcaacaagtttcagcaaaagctgattagtggaaaaatccttggattccactctccagcaatctgccagcacataaaggtgacagcagaaaaagaagattgtgactaccactgcaatcagtgcgaatcttcaaaaggaaaggctatcgtttgcgataagcctgccgacagtggtccagccgacaatggagggccccagacacgtgaagacgcgtctgccgacagtgggtctcggacaacagacaccacgcactcagcaagtggatgaaataattcatctgctgacgtaagggatgacgatcaatcccactatcccaagacccttcacttctatataagtgaagttgcttcatttggagaaggcatctcgaaatctcaacacaactcgagctctcccttctctcttctttatctctctaaatgtgtgagtagaatcccgataagggaataggtagctacagagatcccggcctacgggccaattaaggggatctcctaaaatgtttgtattttcctttgtattatccagaaataaataaagaaaacctttacaaaaacccgagtgttctcccgcctttctctaaatctcatgtatctcaatagatactccgtctgaatagcaatcctccacgggacgctgtgagcctggagacctgatgccgtttgaagctgaagaagtaccgccgaggcagggggccgtttagggaaaaagtaagcgaggctggtttggcagcagtgactcaacctagggagtattcagatagacggaggtagatgaaagacaacgagaaaacaggaagttccgacggacactgttcaggtcagatttatttaaatctgttaatactctcattaaggagattaaccctaattagtggatctaaggggctacttataaacccttatcaatttaaaatcttgttaatcaagaaactaaacaagtggtttaaatgccacaaatcaaccttccgcagcacgaatctggtcgtgcaaaaat

SEQ ID NO: 610 - DNA, 2613 bp, Bean latent virus
  source 1..2613: mol_type = genomic DNA
accggatggccgcgcgattttttttatcccttgatcctacggtcgcccgcaattcgcgcttggtccatgtgaatgtgataaaaagtgaccaatcatgtttcgtttgacgagtctaattattgtttcttcgtccccacgtgatggaccaagtgctttatatatttgaattaaatgcttatcctctttaattcaaaatgcctaagcgcgatgccccgtggcgcacaatggcggggacctccaaggtcagccgctccgcgaattattcgcctcgtggaggtatgggtccaaagatggacaaggcctctgcttgggttaacaggcccatgtataggaagcccaggatatatcgggtccaaagaggacctgacgtccctagaggctgtgaagggccttgtaaggtccagtcatttgaacagcgtcatgatatttctcatgttggtaaggtcatttgtatatctgatgtcacacgtggtaacggtattactcatcgtgtgggaaaacgtttttgtgttaagtctgtgtatattttaggtaagatatggatggacgagaatattaaattgaagaaccacacgaacagcgtcatgttctggttggtcagagacagaagaccatatggcacgcctatggattttggtcaagtctttaacatgtatgacaatgagcccagtactgccactgtcaagaacgatcttcgtgatcgttttcaagttttacacaggttctatgcgaaggtgactggtggtcagtatgctagcaacgagcaggctattgttaggcgattttggaaggtgaataatcatgtcgtgtacaatcatcaagaagcagccaagtacgagaatcacacggagaatgcgttactattgtatatggcatgtacgcatgcctccaatcctgtatatgctacgttgaaaatacgtagttatttctatgactcgatttccaattaataaatgttaaattttattgaatgatcttctattacatgagttacatatggtctgtctgttgcgaaagcaacagctcgaattacattattaattgaaataacgcccaaattgtctaagtacaacatgactaaatgcctaaatctatttaagtaagtcgttccagaaactcgaatcaatgtcgtccagacttggaaatttagatacgctttgtgtagatccagagccctcctcaggttgtggttgaaccttatctggatgtggaatatcctcgtcaaggagaacggtggatcctctactcttgttatcttgaaataaaggggatttggcacctcccagataaaaacgccactctctgcttgatgcgcagtgatgggttcccctgtgagtgaatccatgattgaagcagttgatgtgtaggaagatcgaacagccgcactccaagtcgattcttctacgtcggactgccctgcgttttgcaaaccggtgctgaggtttgatagaggggggagttgaggaagatgaatttcgcattatgaagcgtccacgcttttagatgtgcattctcttgtctatccaagtagtctttataactcgccccctctcctggattgcaaagcacaattgatgggataccacctttaatttgaactggctttccgtacttgcaatttgtttgccaattcttttgggccccgataagctctttccagtgcttcatctttaagtattgtggagcgacgtcatcaatgacgttgtaatctacattatttgaatagacaaaagaattgaaatccaggtgtccactcaagtaattatgagaacctaatgaacgtgcccacattgtttttccagttcttgaatcaccttcaatgatgatactaataggtctctctgtccgcgcagcggcaccccttccgaaataatcgtcagcccattgttgcatatccagtggaacgttgttgaacgacgattgtggaaatggaggaacccatggttccgggggtttttggaatatccttgttgcgtttgagaccagattatgatattgaaggaagaaatgttgaggttgttcttccttgattatctgcagagccgcttctgcagaacctgcatttaatgccttcgcgtatgtgtcgttagcagattgctgacctcctctagcagatctgccgtcgatttggaactctccccattcaattgtatctccatccttgtcgatgtaggacttgacatcggagctggatttagctccctgtatgttcggatggaaatgtgctgacctggttgtggagaccaggtcgaagaatctgttatttgaacattggtatttcccttcgaactggataagcacgtgtagatgaggttgcccatcttcatgtgtttctctgcatatcttgataaacttcttgttaactggagttgttagacgttgtaattgtgataatgcctcttctttggatatggaacactgaggatatgtgaggaagtagttcttggcatttaagcgaaagcgtttcgggagtggcatatttgtaataagaggggtgtacaccgattgaggctctctcaaaactgtcataatgaatcggtgtatggtgtacaatttatactagaaccctcaatctcaatttctgcacacgtggcggccatccgatataatatt

SEQ ID NO: 611 - DNA, 2756 bp, Rice latent virus 1
  source 1..2756: mol_type = genomic DNA
atggcgaatttctctatcctcactgactcggcctaccctacggttccttcgcctccaagtcaagcggtgtcggccgggtttgaaggtgctctgacgacgcttttcctcgtcgttatcggctctctattgttcgttggcgtgttctatctcggctgggttctctgcgtgaaggacctcgtcctcaccttcaaggcccgccgccaaaggaggaccgaggagatcggtttcgggaacactcccgcgagggttgatgccaggggggtctaagagggcctcgtccgggaaagatggttcgaggccgaagcgtcgcaagggagagcccgaggccgcctttagggcccgcatattgggctgggcctcttcccagttcgggaggagggtctacggtggcgttggttcgtcgcagagtgctccgctgcaggtgcggacgtacaagtgggagaatccggacaagagtgccattgctatcgataccggctccatatggatcgtcaatacgttggacgctggtaacggggatgaccagagacatactcacaagactattatctacaagatgctgtttcagggtacgatgtggattaatgatgccacgtcggcagtctgcgggccactgacagttcatttctggctggtgtatgatgctgcgccgaagggggttcttcctgcccttactgacatattcgaggagggattctctggcctgggttcaacctgggtcgttaaccgggacaacgttcaccggttcgtggtgaagaggaggtggcagatgcgactgatgaccaatgggcagaagccgtactacactaaccgcagtgggaacggagatcccaccagtgtcacgatacgggacttcaggaagttcttcacgaagctgcgtactgcaacggagtggaagaactccgcaacaggagggataggggatataaagaaaggggccctatatctttgtgccatgtgttcgcaggcacctgaggggtccgctagagctattaacctgggggtgaagtttaggggccagagccgcatatacttcaaatgtaccggaaatcaatgataataaaacataatattttattcagattccatagatccgttattacaaggcagtacagtttgtacgacgaagcacagtatagcgacggatggagcactgtgcgtagcgtccggaggaggttggtagggcggtattagggaagaagggcaacatacaataccatacacacattattacacactaagcacccgaagggtgcttgaagaaactatccccttcatacatgtaatgtatcacgcagttgctttcgatgtacttggtctgagccggtgtacattgactcagccagtcttcgtcttcatttaccaggacgatggaggggatcccaccacttattaccttccgcttgccgtacttaggattgacggtgtagtcacggtgacatccgattagctgcttccaattagggcagtacttgaacgggatgtcgtctataacattgtattgtgcggtggggtcataagtggtgaagtccaccagtccgttccaatagttgtgcttcccgaggcttcttgcccaggttgtctttcctgttcgggttggtccgcatacatatagggaggtatatcttctggcggttgttggagcatcctggatgtcaaatcatggacgtgctgtagatattcggcagtagttacatcaagataatccatgttttgacgtgtttgtgtgtatacttcttcacataccgtgtatgtctttatgttctctgtggcccactgactcagctgttcgctgcaacgtagctgatcagtggggacagagcttgcgtatggagttacggtggtggggaagagcttctctgcgctgtactcgaactgggccagcctagttgcccagtcgaaggggaatgtctggcgtaccatagagaggtactctgttttcgaggtggacgaggagatgattttcctcatcttggtgtccttggtgtcagatccaggggccctcctcttgagggtcttcttgctgaacggtttggcgttgtagaattcgccccattctgcaatactgacggttcccggcttggtgatgtagtctctgacctgcttgcagttctgagcaggctgacagttaggatgataagactgatagtcaaaaaacctagagtctttggtctccaggcggttagatagctgtaaaagggtgtgtaggtgaaaggatccatctttgtgactctcacgagtaacaagtatgtagataggtacacgactgtggagcagagtaagaagatagtgaaggagttcccaaggatcaacaggacacttaggataggtgaggaagaagtacttggtccgtacgctgaattggtgggaagtggagggatcggccatgagtgaagcggagccgttggatttggctgaaagggacgtgcgggagaatcccggttgtccaaaggctgcttttcccacaaatctataccctagaccagtgcgatgtgggaagtgccttaggtgggaaccttgggccggctatttatatgggtgtcaaagtggctgtagttgggccttggcccactccagccgggggccggaaagcgaaatcgcactgatataatgttaccagtgcgatttctctttccgagcgcgatagcgcgaggcgccgggttccgcgtaccttctacgctgggtcgcctttatgtgtgatgggacgtaaggggggattcccattaatttattagtgcgctccatgacatcggggg

SEQ ID NO: 612 - DNA, 2843 bp, Rice latent virus 2
  source 1..2843: mol_type = genomic DNA
atgtggatggaaagcggacacctaccgcaggtagggtatcaggtgcaaccttctccgccggccgtaacctcgacgttcgttggaaacgacggcgcctggaggtttctcgttttattgaccgcttgttcttgcctagcaggggcagccgtattcgcatgctggcgcatgtgtggtaaggacttgctcctgaccttgaaggcgaagcgtagcaggacgataaccgagctaggtttcggccagacgcctgaacagcgtcgagctggaacgagttctcaaccagtgggcgtcatcggctaacgatcgaggtggagtctggtcttttgggtctggtcagcgtcccagttggccctctagcccggcacggatgccggcgaggactggtagcgctcgtcgtaaacggaaggatgattgggcgtgggattcggccactcgtcgccgtgttcgtccgaggacgtcttatgttccccgtggtggtccgcgagttcgcaggcctagcctgcagtatgtgaatccggggttacttggttccaccgcggtacatgtggctgatacgaatggggaggttagaattataacaggatactcgcgcgggagcgacgagcagtcgcgtcataccaacgagactataacgtacaagttatcactggacctctatgtcacggtggacacagagtgccagaaatatgttggtaaaggcgttgcggtcgcatggttggtctacgatgcgcagcctacaggagagatgccggcagcatcgacaatattcccccatgttgcggatatggctactgcgccctgtacctggaaggtgggtagggaggtctgccatcgtttcgtggttaagcgtagatgggtgatcacgcttgagactaacgggcgtgtagccggtacggtctttcagggtgctaatggtgtcccaccatgtaatcgcacggtgtacttccataagttctgcaagagactcggtgtcagaactgagtggaagaacacctccggtggttcgatcggagacattaagacgggtgcccctgtacatagtgttcgcggcagggaaccagattaattacagagttcagggggttgtaagaaagtacttcaagtctgtgggtaaccagtaaaacggttacatgtaaaatagtttgtaataaaatgtcaattttattcattacaatacaggtggctgcgctaagcagctgttttgcaatacatacacactttacccaattatccctgggcggcgcgcggcgataagggaaaggggtaaacactaaacacgagactgaccttagttaacatctttccggcgctgttgcgccggtgtctgatataaagctgaaattatatagactcatattaaatatgatgcagttgctctcgaagtacgagagctgttcagcagtcattgctttaggccagtcgtcgtcatcgttaacgatgacaattgaagggattcctcctttgatgagcttctttttcccgtatttcggattaacggtgtaatccttctgagctccgacgagggccttccagcaaggacagaacttgaagggtatatcatctattatattatatagagcttcgggatcatacatcccgaagtctacgttattctggtagtaattgtgtctgccgaggcttctagcccaagtagactttcctgtccttgatggtccgcagatgtagaggctgattggtctcgcctgcttgcaaagcatgtatcatgtagccatcgtagatctgcctcagcgtcagaatgaggatggagcaacgaatatacctgcggggttacatggtagatgttctcggcagcccattctgtgagtgtttcatggcaatgaaacatggagtcattgaacggtggttcatatgttaccggtggatcaggaaatagcttctgagaagcatactcccaggcttgcagcctggcgcagtagtcgtacggaaaccacttcttgaccccgttcatgtactccatccttgaggtcgccgagcgtaggatgtcagccattatctggtctttagtcattcttcgtcgcttgttggccagctcggaggaggtgttacctccctcggccgagctggaggaatccccagcagctctcctaatcgtcgtagaaggtccagcctctccattcccagtcggaggaactccgaatgatcctcggggccgaaaggagcccttatgccattctcctgtaggatgtttgagaatataagccagtacagctttagggtttcttgtaccttgtatatttggatgataatccatattatcaaaaaaacttgagtcatgtgtgcgaatgcgatgacgagtctgagcaagagcatggagatggggagtcccatctttatgaagctcagaagcacataaaacgccgtaaggcctgagcagattccagaggaataagcccattgtatgaggctcttggctacatcgtggataagtgaggaagacatttttgttctggaaggcaaagttatgtggttgctcagatgcggattcagtgttggtcatagggttccaacacttagccgcaaaaccgaactccggtgttttactctctagaaccctcttacaggcgatacccgaacgacccaggcttgggccaatttatagttggccggggtttctttgccggcccataccgaggccaaaggggatcgccaccgcataatattacagcgatcccctttgggccgaggggacattcgtgcgctctgattgtccccgaggccttcgcaattaagcatctactttaataaagtgatagtgaaattacgcggtattgcgtgttatccacgccctagtggactacataagtgaggtctttgggctttgttgg

SEQ ID NO: 613 - protein, 679 aa, Horseradish latent virus
MKPQPLKTMEHLLQKTQIQTEQVMNITNPNSIYIRGRLYFSGYKIVELDCFVDTGASLCIASKHVIPEERWEAAPRKINVKIANESTITLDKICRNLDIIIAGERFHIDVVFQQESGIDFIIGNNFCQEYSPFIQFTGHIVFTMKDQYQVPITKLRRAFKRGIPGFLESMKKRSTAQQPEPLNISTNKTVSLSRGRRFGEKLRITQERMVKIEELLEKVCSENPLDPEKSKGWMQASIKLSDPTKVIKVKPMKYSPMDREEFEKQIQELLDLKVIRPSKSPHMAPAFLVNNEAEKRRGKKRMVVNYKAMNDATVGDAYNLPNKDELLTLIRGKKIFSSFDCKSGFWQVRLDEESKSLTAFTCPQGHYEWNVVPFGMKQAPSIFQRHMDEAFKVFRKFCCIYVDDILVFSDNEQNHQLHVAMILQKCYQHGIILSKKKAQLFKERINFLGLEIDQGTHRPQSHILEHIQKFPDIIESKLQLQRFLGVLTYASDYIPKLAQIRKPLQAKLKENVQWRWTPEDTLYMKKVKKNLNGFPPLHHPLPEEKLIIETDASDNYWGGILKAIHIDLSTNESIELVCRYASGSFKPAEQNYHSNDKETLAVIRTIQKFSIYLTPVRFLVRTDNTHFKYFLNINYKGDSKMGRNIRWQGWLQNYVFDVDHIKGTNNCLADFLSREFNGA

SEQ ID NO: 614 - protein, 358 aa, Bean latent virus
MPLPKRFRLNAKNYFLTYPQCSISKEEALSQLQRLTTPVNKKFIKICRETHEDGQPHLHVLIQFEGKYQCSNNRFFDLVSTTRSAHFHPNIQGAKSSSDVKSYIDKDGDTIEWGEFQIDGRSARGGQQSANDTYAKALNAGSAEAALQIIKEEQPQHFFLQYHNLVSNATRIFQKPPEPWVPPFPQSSFNNVPLDMQQWADDYFGRGAAARTERPISIIIEGDSRTGKTMWARSLGSHNYLSGHLDFNSFVYSNNVDYNVIDDVAPQYLKMKHWKELIGAQKNWQTNCKYGKPVQIKGGIPSIVLCNPGEGASYKDYLDRQENAHLKAWTLHNAKFIFLNSPLYQTSAPVCKTQGSPT

SEQ ID NO: 615 - protein, 354 aa, Rice latent virus 1
MADPSTSHQFSVRTKYFFLTYPKCPVDPWELLHYLLTLLHSRVPIYILVTRESHKDGSFHLHTLLQLSNRLETKDSRFFDYQSYHPNCQPAQNCKQVRDYITKPGTVSIAEWGEFYNAKPFSKKTLKRRAPGSDTKDTKMRKIISSSTSKTEYLSMVRQTFPFDWATRLAQFEYSAEKLFPTTVTPYASSVPTDQLRCSEQLSQWATENIKTYTVCEEDAPTTARRYTSLYVCGPTRTGKTTWARSLGKHNYWNGLVDFTTYDPTAQYNVIDDIPFKYCPNWKQLIGCHRDYTVNPKYGKRKVISGGIPSIVLVNEDEDWLSQCTPAQTKYIESNCVIHYMYEGDSFFKHPSGA

SEQ ID NO: 616 - protein, 382 aa, Rice latent virus 2
MTNTESASEQPHNFAFQNKNVFLTYPRCSQEPHTMGLFLWNLLRPYGVLCASELHKDGTPHLHALAQTRHRIRTHDSSFFDNMDYHPNIQGTRNPKAVLAYILKHPTGEWHKGSFRPRGSFGVPPTGNGEAGPSTTIRRAAGDSSSSAEGGNTSSELANKRRRMTKDQIMADILRSATSRMEYMNGVKKWFPYDYCARLQAWEYASQKLFPDPPVTYEPPFNDSMFHCHETLTEWAAENIYHVTPQARPISLYICGPSRTGKSTWARSLGRHNYYQNNVDFGMYDPEALYNIIDDIPFKFCPCWKALVGAQKDYTVNPKYGKKKLIKGGIPSIVIVNDDDDWPKAMTAEQLSYFESNCIIFNMSLYNFSFISDTGATAPERC

SEQ ID NO: 617 - DNA, 2040 bp, Horseradish latent virus
  source 1..2040: mol_type = genomic DNA
atgaaacctcaacctctgaagacgatggaacatctacttcagaagactcagattcagactgagcaggtgatgaacatcaccaacccaaactcgatttacatccgaggaaggctatacttctcaggatacaagatcgtggagctcgactgtttcgtagatacaggagcaagtctgtgtattgcaagcaaacacgtaataccagaagaaagatgggaagcagctcccagaaagatcaacgtgaagatcgccaatgaaagcacgatcacgctcgataagatatgtcgtaacctcgacatcatcattgccggagaacgattccacattgacgtcgtcttccagcaagaaagcggtatcgacttcatcatcggtaataacttctgtcaggagtactctcctttcatacagttcacaggacacattgtgttcacgatgaaagatcaataccaagtaccaatcacgaagctccgacgagctttcaagagaggaattcctggatttttagaatccatgaagaagagatcaacggctcaacaacctgaaccgctcaacatctctacaaataaaaccgtttcactttcaagggggaggaggtttggagaaaaactcagaatcacccaagaaaggatggtaaaaatcgaagaactacttgaaaaagtttgttctgagaacccattggacccagagaagtccaaaggatggatgcaagccagcatcaaactatcggatcccacgaaggttatcaaggttaaacccatgaaatatagcccaatggaccgagaagaatttgagaagcaaattcaagaattactggacctcaaggtaatcaggcccagtaaaagcccacatatggcaccagcgttcttagtcaacaacgaagctgagaaacgcagaggaaagaagcgtatggtggtcaactacaaagcaatgaatgatgcgactgtaggcgacgcatacaatcttcccaacaaggatgaactccttacgctcatcagaggaaagaaaatcttctcttcctttgactgcaaatcaggattctggcaagttaggcttgacgaagaatcaaaatccttaacggcgtttacatgcccacaaggacactatgagtggaacgtggtccccttcggcatgaagcaggcaccatcgatattccaaagacacatggatgaagcattcaaagtgtttaggaagttctgctgcatatacgttgacgacatcctcgtcttcagcgacaacgagcagaatcatcaacttcatgttgcgatgattctccagaaatgctatcaacatggcatcatactttccaagaagaaagcacagctcttcaaagaaagaatcaacttccttggcctggagatagatcaaggaacgcatagacctcaatcgcatatcttggaacacatccaaaagttcccagatatcattgaaagcaagctacagcttcaacgattcctcggagtactaacatacgcctccgactacatcccgaagctagctcaaatccgaaagcctctgcaagccaagctcaaggaaaacgttcaatggagatggactcctgaggacacattatacatgaagaaggttaaaaagaatctcaacggattccctcctcttcatcatccccttccagaagagaagctgattatcgagaccgatgcatcagacaactactggggaggtattctcaaagctattcatatagatttatctactaacgaatctattgaattagtttgcagatatgcatcaggcagcttcaaacctgctgagcaaaattaccatagcaacgataaagaaacgcttgcggtaataagaactattcaaaagttcagtatttatctgacaccggtaagatttctggtaagaacagataatacgcactttaagtatttccttaatattaattataaaggagattctaaaatgggtagaaatatccgatggcaaggttggttgcaaaactatgtctttgatgttgaccacattaaaggcactaacaattgcctcgcagattttttatcaagggaattcaatggagcttag

SEQ ID NO: 618 - DNA, 1077 bp, Bean latent virus
  source 1..1077: mol_type = genomic DNA
atgccactcccgaaacgctttcgcttaaatgccaagaactacttcctcacatatcctcagtgttccatatccaaagaagaggcattatcacaattacaacgtctaacaactccagttaacaagaagtttatcaagatatgcagagaaacacatgaagatgggcaacctcatctacacgtgcttatccagttcgaagggaaataccaatgttcaaataacagattcttcgacctggtctccacaaccaggtcagcacatttccatccgaacatacagggagctaaatccagctccgatgtcaagtcctacatcgacaaggatggagatacaattgaatggggagagttccaaatcgacggcagatctgctagaggaggtcagcaatctgctaacgacacatacgcgaaggcattaaatgcaggttctgcagaagcggctctgcagataatcaaggaagaacaacctcaacatttcttccttcaatatcataatctggtctcaaacgcaacaaggatattccaaaaacccccggaaccatgggttcctccatttccacaatcgtcgttcaacaacgttccactggatatgcaacaatgggctgacgattatttcggaaggggtgccgctgcgcggacagagagacctattagtatcatcattgaaggtgattcaagaactggaaaaacaatgtgggcacgttcattaggttctcataattacttgagtggacacctggatttcaattcttttgtctattcaaataatgtagattacaacgtcattgatgacgtcgctccacaatacttaaagatgaagcactggaaagagcttatcggggcccaaaagaattggcaaacaaattgcaagtacggaaagccagttcaaattaaaggtggtatcccatcaattgtgctttgcaatccaggagagggggcgagttataaagactacttggatagacaagagaatgcacatctaaaagcgtggacgcttcataatgcgaaattcatcttcctcaactcccccctctatcaaacctcagcaccggtttgcaaaacgcagggcagtccgacgtag

SEQ ID NO: 619 - DNA, 1065 bp, Rice latent virus 1
  source 1..1065: mol_type = genomic DNA
atggccgatccctccacttcccaccaattcagcgtacggaccaagtacttcttcctcacctatcctaagtgtcctgttgatccttgggaactccttcactatcttcttactctgctccacagtcgtgtacctatctacatacttgttactcgtgagagtcacaaagatggatcctttcacctacacacccttttacagctatctaaccgcctggagaccaaagactctaggttttttgactatcagtcttatcatcctaactgtcagcctgctcagaactgcaagcaggtcagagactacatcaccaagccgggaaccgtcagtattgcagaatggggcgaattctacaacgccaaaccgttcagcaagaagaccctcaagaggagggcccctggatctgacaccaaggacaccaagatgaggaaaatcatctcctcgtccacctcgaaaacagagtacctctctatggtacgccagacattccccttcgactgggcaactaggctggcccagttcgagtacagcgcagagaagctcttccccaccaccgtaactccatacgcaagctctgtccccactgatcagctacgttgcagcgaacagctgagtcagtgggccacagagaacataaagacatacacggtatgtgaagaagatgctccaacaaccgccagaagatatacctccctatatgtatgcggaccaacccgaacaggaaagacaacctgggcaagaagcctcgggaagcacaactattggaacggactggtggacttcaccacttatgaccccaccgcacaatacaatgttatagacgacatcccgttcaagtactgccctaattggaagcagctaatcggatgtcaccgtgactacaccgtcaatcctaagtacggcaagcggaaggtaataagtggtgggatcccctccatcgtcctggtaaatgaagacgaagactggctgagtcaatgtacaccggctcagaccaagtacatcgaaagcaactgcgtgatacattacatgtatgaaggggatagtttcttcaagcacccttcgggtgcttag

SEQ ID NO: 620 - DNA, 1149 bp, Rice latent virus 2
  source 1..1149: mol_type = genomic DNA
atgaccaacactgaatccgcatctgagcaaccacataactttgccttccagaacaaaaatgtcttcctcacttatccacgatgtagccaagagcctcatacaatgggcttattcctctggaatctgctcaggccttacggcgttttatgtgcttctgagcttcataaagatgggactccccatctccatgctcttgctcagactcgtcatcgcattcgcacacatgactcaagtttttttgataatatggattatcatccaaatatacaaggtacaagaaaccctaaagctgtactggcttatattctcaaacatcctacaggagaatggcataagggctcctttcggccccgaggatcattcggagttcctccgactgggaatggagaggctggaccttctacgacgattaggagagctgctggggattcctccagctcggccgagggaggtaacacctcctccgagctggccaacaagcgacgaagaatgactaaagaccagataatggctgacatcctacgctcggcgacctcaaggatggagtacatgaacggggtcaagaagtggtttccgtacgactactgcgccaggctgcaagcctgggagtatgcttctcagaagctatttcctgatccaccggtaacatatgaaccaccgttcaatgactccatgtttcattgccatgaaacactcacagaatgggctgccgagaacatctaccatgtaaccccgcaggcgagaccaatcagcctctacatctgcggaccatcaaggacaggaaagtctacttgggctagaagcctcggcagacacaattactaccagaataacgtagacttcgggatgtatgatcccgaagctctatataatataatagatgatatacccttcaagttctgtccttgctggaaggccctcgtcggagctcagaaggattacaccgttaatccgaaatacgggaaaaagaagctcatcaaaggaggaatcccttcaattgtcatcgttaacgatgacgacgactggcctaaagcaatgactgctgaacagctctcgtacttcgagagcaactgcatcatatttaatatgagtctatataatttcagctttatatcagacaccggcgcaacagcgccggaaagatgttaa

SEQ ID NO: 621 - DNA, 38 bp, synthetic construct
  source 1..38: mol_type = other DNA
ccactggattcagcgaagttatgcgtaaaggcgaagag

SEQ ID NO: 622 - DNA, 20 bp, synthetic construct
  source 1..20: mol_type = other DNA
ctgagtccagctacgagcag

SEQ ID NO: 623 - DNA, 19 bp, synthetic construct
  source 1..19: mol_type = other DNA
ccactggattcagcgaagt

SEQ ID NO: 624 - DNA, 21 bp, synthetic construct
  source 1..21: mol_type = other DNA
aacttcagcgtcagtttacca

SEQ ID NO: 625 - DNA, 23 bp, synthetic construct
  source 1..23: mol_type = other DNA
  misc_feature 1: note = 5' 6-FAM 520 fluorophore
  misc_feature 10: note = internal ZEN quencher
  misc_feature 23: note = 3' Iowa Black FQ quencher
cgagggtgaaggtgacgcaacta

SEQ ID NO: 626 - DNA, 20 bp, synthetic construct
  source 1..20: mol_type = other DNA
cctgctgtccatctgctctc

SEQ ID NO: 627 - DNA, 20 bp, synthetic construct
  source 1..20: mol_type = other DNA
ctgagtccagctacgagcag

SEQ ID NO: 628 - DNA, 20 bp, synthetic construct
  source 1..20: mol_type = other DNA
  misc_feature 1: note = 5' SUN 554 fluorophore
  misc_feature 10: note = Internal ZEN quencher
  misc_feature 20: note = 3' Iowa Black FQ quencher
acaagactgacagggccaaa